United States Patent Application Publication US 2025/0295137 A1 - sequence listing, part 11

SEQ ID NO: 11 - DNA, 1831355 bp, Latilactobacillus curvatus
  source 1..1831355: mol_type = genomic DNA
aggaagctgatcttttttgtccgaacagcgttcggattaattttataatctaccatataattacatttcgtctctcaactggcgagaatgcgacataatctttttcgtgagtttgcttcattatttgtaaataattctggtaatttaacaaatagcctcttccatgctccgattctactaaagtcattttataagtctcatttatcgatttaaccgacctgtaaatcgttttttgagatacggcaactacatcggccaattcatttgctgtcatgtaatctccattctttaacaaagcattcaatatctgattcatataaccagtcatattttcctccttatgtttatgatagcgctatttttattaaaaaaagataaacctttgcccgttgctacggtcattcttcttgtttttctttattctagtacatcttgtgtaatgtatacaaaaagccctaccgtattccggtagggcttttcgttgtgtggagttgctattaatattattttttggtacatccttagtgtagcaaaacctgggcagcattccagttacaagttcagcgaattgtccggaaagtgaacaatatcactaaattgtttagtcacttttaacgatttgctcaagctgcttcaaattaaaacataaccgctcatcaatcacctccggttcggtctgcagattattttcaaaccaacaatctaattggcgaatgattgcaccgccgtaaaagtcttccaagtgatttaactgttgtggcgtgtattgtgctttgtaatggcgcaatgccttatgaataatctgtttcataacctgttcaaaaaagcggcggcgttccggataatccgctagatgatataaattcaagcaaaacatgcgataccgtgtaataaattgaatggcttcatgacagccggattcccaatcgccactcactatactctcatcaactttttgaataatttgctgttcaagtgtccaccaaaataagccgcacatgcccgttggaaaatgattataaaaggtcgttcgtgacaaattagccgtcttcaaaaaagtcgcgacagtcaatttcgtcgctttttgatccattaataattcgattaaaatcattgccatatagcgcttagtcgcttgtcgtcgtgtcatttacccacccgttctaattactattgttattttaccaataaacaatcattaacggtaatattattaacaaagattaattttatagcaatgaaaacgttatctaattattatcgattgcacaaaaaaagcggtgcgaatttgatattcgcaccgccttaacacattaattatttttctaaaccttccgcaactgcttctgggtagttggctgtgacagttgcagcacaacgcgcacaaagcattgggaacttatcatctgaaccgatatcagtcttaatcatccgacaacgatcacaaacatccccctcagcatgcgcaacactaaccgaaatgccatcaaattgagtagcttctgttggaacatcggctgattgatccgcaattgttaattgtgagacaatcaataattgtttaacatcagcatccaatgaagctaataaagcagcattggcttcgtttggataaagtgttacggccgcttctaatgacttaccgatgaccttgtccatccgggctgtttcaagagcttttaagacatcgtcacggatccccatgaaggcattccaagtttcaactaagtcttcttcaccggcaaaatgttcaacttctggcatttcagctaattgaacgaattcttctggttcgtgtaagtagctccagatttcttcagctgtgtgtggtaagattggtgtcaataacttcgtcaaggctactgctactgcatagaaaacagtttgtatgttacgacgaggtgcatcattttgaccatcgatataaacaacgtctttggcgaagtctaagtagaaggctgataattcgttcgtcaagaacatgttaattgtcttataaactgtggcaaagtcgtaagcatcatacgccgctttacagctggcgatgattgcgtttaagcgcaccaacatgaacttatcaactgaacctaattctgcgtaatcaactgtatctttagcaggatcgaaatcagttgtgttcgcaatcatgaaccgcattgtgttccggatcttccggtaagcttcactgacttgttggaagttttccattgtgactttcacgtctgagctagcatcaactgaagcgacccagaggcgcacaatatccgcccccatttgtttgatgatcttttcaggcaagattgtgttcccaagtgatttactcatcttacgaccgttaccatctaagacaaagccttgtgaaataacagctttataagggctgacttcgccaactgcaacactggtaattaaacttgagttaaaccagccacgatattgatctgaaccttctaagattaagtccgctggataagttaagtcatcgcgagccgctaacacagcttgatgtgatgaacctgaatcaaaccagacatccatgatatctttttcttttgtaaattcaccatttggactcccaggatgtgtaaagcctgctggtaataagtctttagcatcccattcaaaccaaacgtttgaaccatgctctgcaaagagttgcgccacacgttcgattgtttctggcatgacgatttctgtgccgtcttcagcatagaagattggtaatggcacaccccatgcccgttgacgagagataacccaatcgccacgatcacgaatcatgttgtaaagacgggtctttccccattctggcatgaattcaactttttcgatttgtgctaagatttgatcgcggaacgcatcgattgaagcaaaccattgggctgttgcccggaagataacgggtttctttgtccgccagtcatgtgggtaactatgcgtgaagaagtcgagtttcaataatgaaccgttcttttcaagcgcttctgtcaccattgggttggctttatcgtaataaacgccttcaaaaccaggggcatcttcagtcataatccctttgctgtcaacgactgaaaggactggtaacttatatttagtgccagcgttataatcatcttcaccgtgacctggtgccgtatgcactaaaccagtcccagtttctaatgtcacgtggttgcctaagatcaccaatgattcacggtcatataatgggtggcgggctgtcattaattccatgtcagcacccttgaaagtcttcaagatttcaactgattcccaaccaagaagatcagtcatcttgttcaaacgttctgctgccacaacgtatttttggccgtcagctaacacttgaacgtaatcgaaagctgggttaaccgcaatccctaagttagcaggaattgtccatggggttgttgtccagatgatgaattttgtatccgcatctaataagtctttcccatccaccacgttaaacgccacgtacattgatggtgacttgatgtctttgtattcaatttcagcttccgctaaagttgattctgatgaaggtgaccagtaaacgggcttcttacctttatagatataaccttttttagccatttcaccgaagacccgaatttcttcagcttcaaaatcagctgttaaagtgatgtatgggttatcccaatcagcagaaatcccaagacgcttgaaatcttcgcgttgcttgttgacttgttccatggcatagtcgtaacaaagtttacgataatcaacgaggctcatttctttccgcttgataccttttttagccaaggcttgttcgattggcaaaccatgtgtatcccatccaggaacaaaaggtgcgcggaacccgttcattgatttgtaacgaacgataatatctttacttgttttatttaaggcgtgacccatgtggatgttgccgttcgcaaatggcgggccatcatgaagaacgaatgaaggtttaccttcatttaatttttgccgttgttgatagaggttgttatcggcccaacctttttgccaatcgatttcacgattcggtaaacctgctcgcattgggaaagctgtcttgcccaggtttaatgtttctttgatacgcatcaaatcactcctttatttttaaaaacaaaaaaagatcccgccctgaataggacgaaatcttcgtggtaccacctaaatttgaaggtcaatgaccttcctcaacatgcaataacgcgcattaagcgtcccaaattactcaattcatctggaatgaaataaggtgatacaccgctaaacagagcattaccaaccttccaccgtcgttggctcgcttaaatgatgttttgcttgctagtccttatttaaatctgttgcttggttttcaattgggttgtaagaatccgtaacagcttcaaccacttcatctgaatcggtgtcttcgactacatcggagagtacttcatcattgtcatcttcttcgactggtgtttcttcaccagggaaaataatggtttgcgttgttgtcacatcatcttcagcaatttgaccccaaggtttaacttctgcatccgagtttacttgatttgacccatggttgtcaaggtctgtcatatcaatttcagctgaaagagcttgatggtccgctaaatcatctttagctaataaatctgtccattcaggactcttaaccacttctaattgtgattcaagcataacttgtaatctttgacggaaaatccgtgtttgtttcttcaagtcatcggtttcgattgcaatttgttttgcacgttcagttgcatcgtcaatgatgtggtttgatttttcagttgcatcatccaacattgattttgcattcttttctgattcagtttgaatcatttcagcttcttttttagcgttatctttaacacggtcagccgcttcttgtgcaacaatgattgattggttcaacgcatctttcaattcattaaaatacgttactttttcatcgcttgattttaattccgcttttaaactttcattttctgttaaaactgattcgtagtctttaatcacttgatctaagaaatcattgacttgatccggattgtaaccccgcatttttgtgttaaattctttgttatgaatatctaaaggtgttaaaaccattttgaaattcctccatctttttcagcaattattttcttaaaatccccagtgtcactcgatatttttctttacgagtctgaccatcaatcgattggagttgaatccggccaaaaccacgaacagagacgatatctaatagtgctaattcaaaatctggtttatcaaatgcttgccaattcagtttaactttgttggcttgaattaattctttagcgcgttgtcgcgacagattgtaaacagttgaaatgatcgtatccaagcgaaacgagctgacagtcgtttgttcgaattgccaagcgtccttaggcgtcaacaactgtgtatagtcttgttcttgcaaatgaactgatacgcgaccaatcttagtgatttgctcttcgacatagcctgccatcttcttcgtcacaaagaattgccagcgttcttcatcggtcataatatccccaaaaacatcacggtcaatgccagcattcacaagcgtgccaagcaccttcccatgtgataggtttgcaaatttaatcgggtaccgaatctcaaataattgaatctcaaaatccgcatccgttggttcaaagtaatctggagcaatcattgcccgtttccgttcagcagcgttatatccgccattaaagtgataacggacgtcccctttttcaccgaccaaggtttgtaaaataaacgcttgacgcggatctaaaaacgccgttaagattggtcgatattcaacttgtgcttgctcaatccaatccaaaacctgcgcaacaaatggcgcctcgctttttctaaaatgttgatagacatctgcttgattgaccattgattacatccccactaataattgtgcgagtaagccgatcccacgttctactaaatataaaacgaaaaacgcagcaatggctgaaatcccaataccaccgattgcaggaatgaagcggtcaaagatttctaagaaaggttcaactaacttagcaacaaagcgccctaatttactgcccatcgcctctggaatccacgttaataaacaatagattacgacgatgccactataaatccgtaccacatacatgagcatcaagagcacataaaataaaaatagttgcacctagttcacctcaatatcaaaatcattttgatcgacaatatctgaaagattaccatcgatttcatagttcggtggcgtacataagaaaatctgatcaccaacccgttgaatttcaccgttgatggcaaaaactgcccctgttaggaaatcaacaattcgagtggcttgtgtcgcttcaattcgtgtgaagttaacaatcactgctttattttcaagtaaacttttgccgactttttttgcgtcggaataaatccgtggttcacataagacaattttattcattttagtagctcccgcagcttgcatcgagacgacgttattcgggcgaacacttggttcaccttcattagtgacagccgcagtttcttgcgtattagcatattcatcttcatctgacatgccgaaaaaattgctaagactaaacttaccagccatgagtcatcctccttagttattgcgacggcgcttgaaaaatggcggcacatcgtccccatttgggttatcttgcttattatcatccgcttgggctgtccgtttgaagatatcgaaatctttcttttcaatttcatcaaatttttcagttgcttgcgcttgctcgcgggcacttggttcgcgacgcatatcccaatctacaaatggatcattattttgttctgatggtgttgaaggcgctgttgtctttggtgctgaattgtttgttgctggacgacgtttgttgttatcttcatcaatcccagttgcaataaccgttacaacaacttcatcaccaagattttcgttgattgaagtcccgaaaatcaagttaacatcgttagttgcagcttgttgcacgataccagcagcatcttgcgcttcaaacaatgacaagtctggtccacccgtgatgtttaagaggacttgttctgcaccatcgattgaaacttccaataatggtgatgaaatagccttcttcgttgcttcagctgtccggttttcacccgttgctgaaccaatccccatcaaggcagagccttggttagccataactgttttaacatcagcaaaatccaagttgacaaaccctggtgatgtaattaagtcagaaatcccttgaaccccttgacgtaaaacattatcggcttctttgaaggcttccatcattggtgtcttcttgtcaacaatttcgagtaaccggttattagcaatgatgaccattgtatcaacatgttgctttaattcagcaatccctgaagcggcgtttttaccacgtttagggccttcaaatgtaaatggacgagtaacaacccccaccgttagtgcgccaagatctttagcaattttggcaacaacaggggcagcgccagttccggtaccgccacccatgccggctgtgacaaagatcatgtcagcgccttttaaggcttcgttgaggacttcttcactctcttcagcagctttttggccgatttcagcagttgcgccggcaccgaggccgcgagtcaacttaggtcctaattggatctttgtttcagcttttgaatcttcaagtgcttgaacgtcagtgttagccgcaataaaatgaacgcctttaacgccttcgttgatcattctgttgacagcgttaccaccagcaccaccgacgccgattactttgatgattgcgccgctattttcttgtgctgcatctaatgaatattccatctgtttttcctcctgttacgactagcccttattcaaaaaagttactaaagaaatttttcaggccttcgaatgcattttttgattgatttttaggtttggttttcttacttggtacttctttggttgttgcttgaggtttcattgttgatttcgtcactgtttggtctaattcagtctgtgctacattcccaagtgcgccttggaccaaccaatcaacttccgacaagttagctatgtagttaattaaactcaacccttgggcaaatgatgggtgccgcaagcccatttgatctggaatgtataacttcactgggcaattaaagatttccttagccaagtcgacaatcccaggtaaagctgtcacgccaccggtcataatcaccccaccaggcatatcaaaagcgtgtactttatccaattcagctttcaaacgatcaaaaatctgcatcgtccgtgcttcaataatctcagctaattttttctctgtcacttgcactggtaaggcttgaccaacaacttcaattggaatttgttcttcttctgaagcagccaatgaatcagcattaccataatctcgtttagctttttcagcattttcaattgacgtgttcaagaccacggaaatatccttggtcatatggtcgccaccttcttgatcaatcgccgtaaattttaattgatgatcatgaatcacagcagctgtactttgaccaccgccaaggtcgacaacgattgccccaaaatcttgttccccgtctgataaggctagcttaccaagtgctaatgggttcactacgagttgtgatagtgttaaacccgctttttcaatacatttctttaaattatgaatcattgtcttgggtgcggtgaacaaaattccgttcatctcaagccgaacccccatcattccgcgtggatctttaatcccatcaaacccatcaaccgtaaacgattgcggtaagatattgaggatttcacgttcaggtggtaaattccgaaccaatgcggcactagcaacgtcttgcacatcttgaccagtaatttccttagattgatcagagaccgcaatcatcccttggcattcttcgatttgtagttggttggctggaattccagcaacaacccgattaatttcaatatttgctttttgttctgcttgttgtacggcttgttggatagcggtaaccgcttgatcaatgtccacaatcgtcccgcgacttaatccgtttgatctagctgatccgacgccaatcacattaagttgtttattaattgattctgcaacaattaccttaattgaagtagttccgacatcaagaccgacatatatttttgaattctccattaagtgtgtggaacctccttgcattcaattagaataaaatgattcctatgctaaatagtaccatatttcgactagatttagaaagccaatccaatctttttaaacagtgttaactaattttttgttgaatcggcctcagaattatcaaataatttggcgtaagcgccaacttctaagtcaattcgtcccttaccgtccatttgtttcgccagtgtgggataatatttaattttcttggcaagtgtccgcaaatccccaacaacctcattaccatcattcatatataagtgaacttgataaggattattgttcttagctgttaaacgaatttccgacacagcactttgaatgctgtttggaaaagcttgatatagttttaacccttgctttaagaaggcgtcatttttaaattgactatagacagggctattgccgagagactgcgtcattttcgtctttaaaatcgtgccattttctaagattggataatattgtttatgccgcactagatagcccaccgtaggatattccttaatcgccaatgtcagttgattaaactgatcaactttgacatttacgcttttcaccttaggtagtttctggtgaatccgcttctcaatcgctttttcctgccagatttgtgtcaggacgttatcgccaatccgcacgccactcgcattaatcacctgttgatcaggcactgatttagtcccgttgaccgtcatttgttgaacgtcgctaatcggcaacataaaatagattgccacacaagcgcccaatgtgaaggtgctcaataacgctgtcaaccgccactttgtctttgccgttcgttgcgcttttagatgtggtagttgaccactaattgttggtcgcccaggcgttaaccgttgccgacgttgtttcttccaacgctttagttgataagcgcgccaaacgtttagtaattggagcggatcgagcgacccatttttagttgtttttttcttcaagtcatccgcccccttcttaacttagatgatagtattaatcacttcaataatgcgatctgaagcgtctggaatccccattttcttagctgctttagccatggcttgttgactatcaggggttgccaaaagcgtatctaatgactgaactaatttgtcacccgttaattgtgcttctggaattaaaatcgctgcgtcttctttaaccaaactctcggcattttttgtttgatgatcatttgttacataggggcttggaatcaaaattgacggaatcccaagtgctgtgatttccgccaaactcgtcgcaccagcacgaccaacaatggcctttaaatctggtaaaatttcaggcatatcgttgatatatggtacaacagccaaattatcgttgagcgtcatcgtctttaattgtgcttgaacatcatcaaaatgaacccgtccagaaacgaatagcacctgatactctcttgtattaagtgctggtactgcatcgataaaagcttggttaatacttggtgcaccacggctcccaccaaacacaagcactgtcggactgtcagtcttaagcccgaattcacttaaacgttcgtttggtaacattccagcaacttgttgggcccgcggattgcctgttaatacaattttatgcattgggaattggtcgctgactgattcaaaggaaatggcaactttatcgacaaagcgcgccaaaaagcggttggtaaccccggctgctgagttttgttcatgaatcaacgttggtacttttaagcgacttgctgcatatagcaatgccccagaaacatagccacccgttccaatcacaatatcaggtttgaatgttttaatcatttcttttgcctctttaacactgcgcaagaaaagttgaattgttttaatattcgttttaatgcccttcatattcatcgaacgtttaaatccttggatttctaacgtcttaaaatcgatgccttgatctggcacaattttactttccaaaccgcgtttagtcccaacatataaaacggcatccaacaagtcgcgttgttgcattctttcaattagggctaacgctggatagatgtggccaccagttccgccaccagatatcattactctcattttagaatctccaatttaatctgtaatttgttcgactgccttaataaagacgtctccacgttcttcaaacgtcttgaactgatcccagctcgcacatgcaggcgacaataaaaccacgtcgccggcttcactagcagcataagcttcaggcactgcttttgttaaattatcaactattttgatgacgggaatacctgcttcacgtgctgtctgtgccaacaattgtttggtttcaccatataagatgattgcttttacgtgttcttttagtagtggtaataatggttcgaaagtaaagccccggtcaagaccacccgctaataaaacaattggttgtttaaaactcttcaacgcgacttcggtagcttccatattggttgctttagagtcgttatagaagcggcgaccttcatagctcgtcacaaactgcatccggtgtttaacaccggtaaaggtcgttaaaacatcaatgatcgcatcgtttgattggtccatcaacttagccgccgcaattgcggccaaagcattttcaatattatggtcaccagggacgttaatatcagtcactggcattatcacttcacccttaaaacaaagttggccatctttgacataggcgccagcttcagagttgcctagccgtgaaaatggcacaacttgcgccttagtttggcgactcaattcacgtagttcaggtaagtcccagttgacaacaaaaaagtcgtcagccgtttggttttgaataagtcgcattttcgcagccacgtaattcgcacgcgagccatgatagtccaaatgtgcttcataaatattcgttaaaactgcaatcttaggtttaacggttgttgtaccgagtagttggaaacttgataattctgtgaccatcacatcggcagccgtcactttttgggcgaccgcacttagtggaatgccgatattgcccgcagcgtatgcgtgcccctgggtgcgattttcatctaacatcaacgtaattaacgttgtggtagtcgtcttcccgtttgaaccagtcacactgacccattgggcttcagacacttcgtacgcaagttctggttccgttaaaactggaatcttacgcgcaatcgcttctgccaccattgggttatcgtaacgaatgcccggatttttgaagaggtatgcaaagttgcgctcaaataacgccaatggatgcgatccagtaatgacggttgcccctaattcacgcaattgtgcaacttgaggattgtcttcttgttcctttccgtcattgacggtcacaatcgcccctaattttaataacaatttagcagcattaaagccgctcttccctaatcccaaaactaaaactgcctgatcttgatacgtcgtgctggccttcattaaattcgccctcttctaaaaaattaacagataaattgctgaacagatgatactaaataaccaaaagctgatatcaatccgccattcactccaccctgacatttcgaagtgatgatgaatgggactcattttaaaaatccgcttatggaataacttaaatgaaccgacttgtaacatcacacttgctgtttcaatgacgtatactaacccgaccaatagcagtgagaactctcgatgtaataaaattgacatggctgctagtgcgccaccaagtgctagtgaaccaacatcacccatgaaaatttgcgctggttttttattgtagattaaaaagccaagcaatccgccaataatgctgaggccgaaaatggcgacatcaatttggttttgatgaaaggcgataattgtataagttgcaaatgagatggttgccaagccagcaactaacccatcaatgccatccgttaagttcaccgcatttgagaaaccgactaaccacactaagacgaatatacaaaagaaccagttacttgaaatagtgccaattactgggatttcaagtgcagtactgaagccttcatggaaataaacagcgatgaagacaatcccaccaataatttgccctaacaatttttgccaagcgcgtaagcctaagttctgtttacggaaaactttaataaaatcatctgaaaaaccgagaataccgtataacaccagaataaacatggcaattaatagactattcgttaactgttttaagaataatcctacccaaatacttgaaacaacagcggcaataatgaataagagcccgcccattgttggtgtcccatttttcttagcgtgccatttggggccttcttcacggattgtctgcccctcttttttaaagcgtaaatacccgataaaaagcggcataaaaatcaccgtaattacaaacccactcattaagggcactaaaaattgtcctgctgccatttcataaactcctttaatccaactatcttattttaattgtacttttatttttttaaccccatctagcaacccattgaccgctaggctttgatgataagcatatccgctacctttgatgtcaatctcaacacctgttaattgcgcgagcttcaagaggtcatttttcgaccaacccgtgacatctggcatcgtcattgccccattggtcattaaaatgactcgctgtttaggtaaaatcacactattggcctttggtaattgctggacgactaagttcccactaccaacagaagcggtttgtaggcctaaatccgttaatttcttttgtgcttcatccgttgattgaccaatcacagacggaactgttacttgttgttgtgtgtctttttcagcctttttggtatactccagtgcccgtttcatcattggattgaagacctgtgccaaaatactttcagcactatctgtcatattctgtggctgtttcattgtgacatataaaatatacttaggatcatcagctggtgcaatccctgatacagagaagatataattgcttgcgccggttaaatagccaccgtctagaccagtaatttgtgcggtcccggttttaacggctactttataatctggaatttggtaaacctgacccgtcccataatcttgataaacaacatcttccatattttgtaagacagatttggccgtgctagccttaattggtttaccagctttgattggttttacttgatgatcctgattaatcccagataaaatctgcggtttaatcattgtgccatcgttcgcaatcgcacttgtcatctgaagcatctgcattacattaacgttaatcccttgaccaaatgaagttgtggcctgatctagtggccgaacatattgcaatgtcccctctgtttcgccgggtaattgaataccagttggttttaagaagccaaacttctgaatgtagtctttccaaaccttaggacccatggcttgttcaagcttgaccatcccaacgttacttgatcgtgcaaaggcttgactcaacggaatcatcccccagccactcgtttgccaatcgctaattttcttatcgccaactccaatcgaaccggattgataatactgattaggattgtaattaccagagtcgatggcagctgccaaggttgcaattttcaaaacagagcctggttcatagccatcttcaactaatgtatctcgccaaatcttgccaattccctttttagtgctggcattaaaggttggtcgttgtgaagccgccaaaatttcacccgttttagcattcatcaagacggcattcatactcttaggcttatattttttattgacgctcgttaataaagtttccatgtatgattgtaaccgagaatctaaggtcaagtaaatatcttggccgtttttagcggcttttactttgtttttcttttgattgatcgtgtatccataggaatcacgggcaaaattcttgtaaccatcttggcctgctaattgtttgttgaagtatttttcaattcccattacaccaacgaggctttgatcagcgccgtcttcgtcctttggtgattgagcgataccaatgacgtgagatgcgaatgttccattagggtacagccgcgtaggggactcattgaagtaaataccggttaaatgttctttttcaatcttccgtttgatgctcagtgaaaggttttggccggcacttccgaattcaacttgataaactgaacggttagctggcgttaattgtttatagattttttcttcactcaatggtagatagcgactcaaaactttcgctgtttttttcttatcagttacatataacggcttcttattaggaccaacgtaatcatgacttaataccgcatacactgaataggcgttaatatcttgtgccaaaacgttccctaaagaatcataaattgtaccgcgttgtgcgcgaatcacggaatcagctttgtattttttctgtgatcgtttcgttaaatccacccctgcaatatgcccagtagcaacaatgtaagcaaaacgaccggcgaaaactagaaaaatcgccgcgataattagcaataaaagcctgccaaaaacgcgtcgattccgccgtggactcttacgtgtcttaactgatttcatttagacacgttccgaatattattttcatttagtttaagatcatgtttctgggcaaaagcattcagacggtcagagcttgttaattcaccgatctcctgttttaaatcattattgttagcgctgacttgggccatcttttgagtcgtactttctaatcctcgttgtgcattaacaactgcaattttggtggttaacaaactaaccaacatcgcgaaaaagataattccaataactgacgtcgctaatttttcaacagctgaaaaagccacttttttagactggcttgcaactgcttgtttatgtgcagtaggctgcgtttttagcggtgctactggcgtttctaattggcgtgccgtgttagttgccatcatcatcaatccttctagtcaatttctttttgtttttctgcgacacgtagcttagcgctatgtgcacgatggttttcttctaattcatcatctgttggtagaatcggcttgcggttcactaattttagaaccgttttttgttcttctggtaaaattggtaaccctttcggtaaatctgggagcgttgcttgttccttaaacatcgtcttcaccaaacgatcttctaatgattggaacgtaatgacactgatccgcccgccgacattgaccaatggaatagcttgttcgagtgaatcttcaattgcccctaattcatcattgaccgcaatccgaatcgcttggaaaatccgcttcgctggatgtccaccctttcgtcttgctggtgcaggaattgcttctttaatcaaatcagctaattcgattgtcgtttcaatcggcgcaactgctctttgttgttcaatcttccgcgcaacttgttttgagaacttttcttcgccgtagcggaaaaagatcttaattagttgttgataggtccactcattaacgacattgtaggcactgagttccgccccttggtccattcgcatatcaagtggggcttctttcttataactaaacccgcgttgggcatcatcaaattgtggtgatgatacgcctaaatcgtataaaataccatcaatcttagtcacaccgtgttctgctaacgctgcttttaaatagcggaagttactcttaataaaagtcacttggcccgcttcagcatatttggctaatcgttgtttactacttgctaaggcatgatcgtcttggtcaaacgaataaagatgaccggtcgtcagctgagataacaaatattcactatggccgccgccccctaatgttgcgtctacatacacgccatcgggttgcacattcaaggcatcaaccgtttctttcaataaaacactttgatgtttaaatgtttctgtcatctatttaccatccttctaaaaatcaaaatctaacatattttctgcaatatcatcaaaattctcttcagcttcttcgctaaagctcgcccatttttcctggctccaaatttcaatgcggtttgagaccccgattaacacacattctttttcaagaccagcatgtttagcaagtgtgtctgggatattcacccgaccttgcttatcaggggaacattcgaccgccgctgagtagaaaaagcggacgaacgcgcgggcatcttttttagcgaggggcagtttttttaacttctcttccaactgttcccattcactaagggggtaaccaaaaatacaattgtccatgccacgggtgagtacaaattccgcacctaatgattcacgaaatttagccggcatgattaaccgacctttcgtatcaatcgtgtgatgaaattcgcccatgaacataaccattcacccctttgcccaccttaactgattttagtctaccacaatcccccactttctaccacattttgccaaaaaaaaccaaaatcttatcattttggaaccaattgtacacgatatttatattactagcctttttgaccaaaaaaaacagccatttcgttaaccgaaatggccgtttcacttgttaattaagtaagcttattttgggctgtcgcaccacttctaagcaacgccgcaaaaaattgctcactttaatctaatttttagaagtttaaaatgccagttgcagcgagtgaaccaaaaatgactgagcccactgtggcgattaacattacccaaacgaaaattttagtaatgcgactaaacgtgcttgtttgtttcttcaattattccaccacctagactttttcttatcagcagtttacaccgaatcacttgaaagtgcaactcagtcctttttatcttttccaaaagacggtacaatgggactattaactttcgaggtgatttaaatgccatttagcacaacacttttctttgcaggcttaccgcccgtctgtgtcgcactcggctactgtatcgaccggttgactcagcgtctatttaaacatcgttttcattatattaattggctaccaattccattgctagtaagtgctatctttctgagtatgccaattttcagtaaagctggctggttcttttgcttagctatctgtctgtggggaatcatctggagcttaacgcgcttttactacgaccgtgcgctgtacctacgtaagtttctacggagttggtggcgctttgtcatcgtgatggccacagcatggtacctatcctttctaatcatcacactcctttaaaccaaaaaagcggtgtcgactctttcaatttgtcgacaccgcttttcttagtttaaaaaatatttccctaacgcgcttaattgcgtaattgtgattgtcggttgcaccatgattggcaatcgatcaacatcaaaataggccgtcgccacatgggcgttaatccctgcttcaatatctaatgcacgatcaccaatcatcacggttttagttttatccagctgataacgatcacataaatcgttcaaactatctggcgccggtttcctggcaaatccgctctgactcgtaacaatttcagtaaaataatccgctagtccatgcgctgccaaaaatttttctgcagcatcatcacgatgggtcaataagaaattctgaccatgtgcactaatctgtttcaaaatcgccgctgcccccggataaggttgtggcgtctgttgtaattggtgttctaattcatgatattctcgatccaattgttcaaatgaaacattagtttgctgagcaagcatctgcagttcccgtttaattgaagtctgcttaatcgcttggtataagtgcgattgatcgactgcgacttgatgatcacggtaaacctgactgagcgccgtcatcataacaggataagtatcatacaatgtaccatcgaaatcccaaatcgcattttgataactcattaattacccattctcctttgtatcaaataggatagtgactggaccgtcattgaccaaagccacttgcatatcggctccaaattctccagttgcgacgcgaatcccagtcgctgctaatttttgattaaactgttcgtataagcgtttagcatagtccggtttcccagccgcagtaaagcttgggcgattgcccttcttagtgctagcaaaaagggtgaattgtgacaccgataaaatggcaccgtcaacctgggccaacgccaaattcatcttgccatctgggtcttcaaaaacgcgcaattgactaattttcttaaccaagtaatctaaatcagcttcagtatcatcatcacaaataccgaccaataacaaaaagccttggttaatcttgccaacaatcgtctgatcaatcgtgacacttgcttggctcactcgctgtaatactactcgcatattaagtcgctcctatccttgaacccgtttgacttcgtaaacatctgggatgttcttcacggcttccataatcgtttctaaatgatctgtattgcgaatgccgactgtcacatgaatatccgccatcttatcgtgatcaatccgccccatcacgttatttagctgtttcgtatgtgcatttaaggactgtaagacatcgttcaatagtccaccacggttatagccgtagatttccaaattcgcatcatagagttgatcattcttagcgttggtattttcccaactgacttcagtcaatcgactgttcatatctgcccgatcaacgatattcggacaatcgcgccgatgaacagaaaccccacgtccctttgttacatagccaacgatatcatcaccagggactggattacagcatttactcaagtgcactaagacattgtcgacaccttcaataacaacaccgtcttcatgtttgattgtgatatggctaccatttgctttaggccctggttgttgtgaatccttcgctgatagaatctcagcttctaatgctttttgttcactttcttcttttgcccgtcgttctttaatcgttaagcgattgacgactgactgtggtgagatttcaccgaacccaattgctgcaaacagttcttcttcggcattaaaattaaaatgcggtaggatgacagctatctcggctttagtgaggtgttcttttggtgtataaccatcttctaccaacagatgttcaacagccgtccgtcctttttcgacgttttcatcccgatcttcttttttaaagtagcgcttaaccttattccgagcacgcgcggtgaaagcgagcttaatccaatcacgacttggtgtcgcacttgttgacgtcaacatctcgacaatatcaccattacgtaattgatagttcaacggtacaattttgccgttaatcttagctccaacagcgtggttcccgacttcagtatgcactaaataagcaaaatccagtggcactgaaccctttggtagttcataaacatcgcctttgggtgtgaaaacataaacgcgatcgctaaagatatcgcctttgacgctttccataaattctgcagcatcatcggaagcatcttgaatttcaagaatttcacggaataaatcgagtttacgccctgattcatccagcttaatctgttccttaacgccttctttatacgcccaatgtgcagcgaccccatattcagcaacatcgtgcatttcttgcgtccgaatttgcacttcaagcggtttgcctttgggaccaatcacagttgtatggatcgattgatacatgttggcctttggcattgcaatgtagtctttaaaccgaccgggcatcggtttccacttagtatggattgctcctaaaacagcatagcagtccttgattgagtcaacaacaacccgaattgcgagtaaatcatacaattcttcaaattgtttatgctggtcgcgcatcttgcgataaatcgagtaaagatgctttggtcgtccataaatgtcgtaattcatatctaaatcagcaattgagtctttaatgtcttcaattgcttcttgaatataagattcgcgttgtgtccgcttagaattcatcaggtgcacaatccgatagtactgttgtgggttcaaataacggagcgagatatcttccaattcccacttaatcttactaatccctaaccggtcagccaatggtgcatagatttctaatgtttcgttagcaattcggcgttgtttttcgggtttcaaatgtttcaacgtccgcatattatgcaagcgatcggcgagtttgaccataatcacccgcaagtctttagccattgctaataacatcttccggtgattttcagccagttgttcttggtgtgatttatatttaatttttcctaatttcgtgacaccatcaacgattaccgcaacatctttgccaaacatctcttcaacatcacctaacgtgatattcgtatcttcgacaacatcgtgtaagtaaccagaagcaaccgttgcgggatccatcttcaattcagcaagaatccctgcaacttgaattggatgaataatatacggttcacctgattggcgaacttgttctttatgcacataagctgcaaaatcatacgctttttggacaaaagcaagatgctcagtattcatgtatttctgacataactgtagcacttcctgctgtgaaattactttttcttctggcatcctgcctcactccaattcctcttactcgattaaaaatgtactgaatacaacaaaactgactcaactaattaactgtcgagtcagtttgcttaacggcgttcatacgcagtattaattcctaagtaacttaataaacaataaataggaacgaaccaatagttataatctgcgtagcgcacaaccaccatcaatccaaataaaatcggcaggtacaaaatgtgataccaagctgcatgggtcttttgaacacgatacccaatcataaaggctgcgcaaccattgacagccatgaatagcagtccaatccgccacgttttatcgatgtgcaagacaccaaacactagcggtaaaacgaccgccaagagaatggccactaataaatagcgtacccaatccatttttaaataacgattattcataaatttagtcatgttgtgcccctctgtaaaaagattacatctatcatactataaagtagccaattctgtcacatacgaaatcgcacttaacagatataacggcgcggtctcggcccgtaaaatccgtggtcctaaaccagccatcttaaagccagccgccgcaagcatctcaatttccttgggcgcaacgccgccttctggaccaaaaacacaaagtaatcgatccccaggttgggctgtttgtaagctctgaactaattgggcatgctcaccgtctttagctgactcttcgtaagccactaatttaatcgtcgctgattcttgtgcgaccgccgttaaactgttgcgccattcaatagttggtacatgcgtccggtgagcttgttcggctgcttcttgcgcaattttttgaagccgcgcaactttcttagcttgttttttatcatcccagcgtgcgactgagaattggctattacagaaaataaaccggtgtgcacccaactgcgtgcctttttgaacaatccagtctgttttgtccccctttgacaagccgcatacaatcgtcgtctcaatcggtaattcaactgattttgtaattggcgattgcaccgtaacggtgactgttttgtcagttgcatccagttcagttaattcaccgatgaatgcttgttcatccggcgttaccaattcaacacgatgaccaggctgcatccgcatcacttttagcatatgatgtgcagtttcacccgttaaggtcacttgttgttctacttgaattgcttcatcaataaaataacgttgcatgccatactcctcttaatcgtcgtccgtcttttggcgtgtaattaatgccacccagtcacccatatgaagggcttcttgaacaacaaaatcattcaccgctaacgtttcacggacaagtgcttctttatctgcaataatgccggccagtaataggtgtccattgtcattcaataaagccttggcttggggaatcaagggcacgataatctctgctaaaatattggccacaatcacatccgctttcgttgtaatcccgttcaacaaatcgttgggatgggcatcaatgccagcggtcactgggttgagggcaaaattttccttagcggcatcaaccgcaacttgatccacatcataggcgcgaatatcattgacccctaaatgcgcagccgcaatactcaaaaccccagaaccagtcccgacgtcaattaaagattcaccgccgcgtaaaaccatttctaacatttgtacggatagatgggttgttggatgcgttcctgttccaaaagccatccccggatccatccgaatcagtgcttcgcgttcatcagtcggttgatagtcggtccaacttggcacaaccgttaaaaagcgagttagccgcgttggttgataatatttcttccaagctgtcgcccaatcatcatcggtgacttgtgccaatgtcaccttaccagaaccaatcgctaacccaaagtcagtcaattgggcaacgcgttgttcaatcaacggtaatttttccggcacaaaaactgtttctgggaaaaaggcactcactgcagcacccgtttcaaggtggggaatactgtctagatcaataatttgatctggctttgcctttaaatgttcataatcggctgcgtcttcgatttggattccttccgcaccattttccgttaaaatattggcgattgcttccactgcttcattaacagtagcgaccgttacttttgtccattccatgtagcatgtctccttcttaatgcgggttgcttagtatttagggtaagcgtagtattttttcgctaattgatcatctgcttgagcgacagttgcttggaaaacagtgtcatcccagtttaagataaaggtttcttcgtctgattcatcattcacaaaagcggctaattgatcttcgccttcatctaataagtcttgtaaataattgaaaaagccccgaccgacttgtgcgtttaaccccttgcgaccagcaaatggaatcactgctaaataattgtctgcatattcaaagccgtccatcttactttcatcgaagaataaaatcgcatcttcataactgatttcatccgattcgttcaattcaccattttgatcttcaacggcaattgcttgttccttagtcacgtttaatgtgaattccaattcaatcgcccgagcttgtttgtcccagttgatattcatatccccactaaattgtaaatcatctaattctgcatcgaaaaatgctaacatatccatttcagccactatattcaccatatccttttaattagtcgttatttaagtcaattttaaagttgaacgtattaacatcatacctgattatgacttgaatctaaagcaatcattcaaaaaagcccagaacaaaatgtcccagactttcaatcgtaattctacttaatgtgctgcttggttctgaccccaataaataacgtccatactctgatcgtcataacgttggaactcaattccgagtgctgcatcagattctgccatcacacgaccatatagccgcatatcagcttctggcgtgttgccatctgggcgaatggcatgcatcaacataaacttagccatttctgattgtagatgggcttcaatcggggccaacggatcaaaaaccatcgtgacaaaccgaatatcactactatcgccatcaccaattaattcaacaatcggaaacccaccaaaattttgttgttgttttaaataagccaataactggtcaatctgttcttttgtgaaggctgatttataaaagaggaaatgccaagtttgtcgtttcatcgtgtcacccacccgttatttattacatatagtatgccatactgtcaccaacaacgcgaacttagtctttttttggtaattgattcgattttggttggtgatatgcctttttcaagccagcaaatgtcgcttgaatcttttggtaatgcatttcatcgttacgcgcatgcttcaccaactgggtaaaatcgtgggactgtaagtccttttctgtttgttttttaaaccacaacatatcatcactccttatgtaattttattatacaacgaaacgttatcattgcagtcttaaatttacttttaaaccaaattgccgtaaactaacactattcattaaaggagtctattatgggaaagaagaaaaagcaaaacgcattatccaaaacattagttgaaaaaattctagataaacaaaaagtggcctacacccaacttgaattcccaacagaggaagtccacaacgttgcccaaatgaaggtcgatcatctcgatatcgatgaacatcttatttataaaacattggtgctctctggtaagagtaccggcccaatcgtcggtgtcgtcccgattgattgtcatttagacgaaaaaaaattaagccaaatttctgacaacaaaaaaattgcgatggtcccattaagggagctcgtggccactactggctacgaacatggcgctaacacgcccgttggaatctgggaacaatcccactatccgatttacattgaccaacaggctgaaaaggaaccattcatctatgtctcatccggtaaaattggccgctcaattcagattaatccgcaagacttacagcgggtcactgaagccacctttgctgacatcagtgaagcctaaaaatatgataagaggggctagaacaattcacttgttctagcccctcttatttttgagtttaatctaagtattgggccaaattagcaccagaaatgatgacttgttccttcagaaaatttggttctttaataatattatgaaccaccgtttcgggtaaaacatcattttgtgcgagcatttgcagagcatcatcttgcatcacgacttttttaaccatattatgtattttaatcgttgcaacatatttttgcgattcccgttcttcaaccacttcgtagttgccgtaataatgtttatctgtcattaactcatccccttaaggttaataatatcatatttcaacaaataaaactaagtaacttatcctataataaggggaaactgttaaaaaataccaaaaaaaaagcaaaacaataactgttttgctttttccattatagtaaggagagtacaggtctcattatacggcgtttaatcattgttattaaaacacttttaaaaattgactaaccttttgactaaccacaaaaaattaatcgcttttttgcgtagctaaatatgaggtgattaaatgacagtattagaaatcaaacaacttggtctttttgttgaactagaaaaatcaactattaatatagtaggaactgaacattttggattagaattccaaaacgaaatactagccggcatctggtttcagacgctacttgatttagtagaaacactacccgaatttacgctataatctgattgaggtgatcgtatgaatgataacggacgtaagatattagctgaatttgaacaagcttataagcggctaccacgccatgcttattcgttgctagttgtaaaggatacttaccatgactcttacaacttctatttagaagacgtgtatggcgcaacttggagcaacgggcttggttcggtgtcctttgataacttagatgagtataagagcgtgctaaagaagttgcttaccagtggtttgcctgtcgagtatcgcggattcaaggaggaatgaagatggtcgctttagatttaactggacaacaattcggcgaactaaaagtaattgtcagagatggcaatattggaaaccacgccgcgtggctgtgtcaatgctcatgtggcaatcaaaccactgtgccgagtaacaagcttaaatctggtgctgttgtgagctgcgggcacttaaagcgcgatgtaaaccacacaggcctaaggcgtggttatcaagacaagaagaaaaacggtgtcgctaccttcctgttagattcgaaacgtaaggttagatcggatagctcaactggcgtgaccggtgtaaaggtggttaaataccgcgatggctcgattcactacgccgctgaagttactgttaaaggcaatcgccaccgcattggaaccttccctactgttgaagaagctgctcaagcgcgacaagctgcggttgatgcacttttgaatgatttaaatgattagccctttcgagggcttttttatttaattaaaatattacgtatttttttacgttattacgttgacaagattacgtaattacgttatacttagtacataagttaaggaaaggaagttttaatcatggcaatcaataaatcaaagttattcaaaacagcttggcaaatggctaaaggatcagcgaaacgcttaggcggtaacgctgttgaatatttatcagatagcttaaaacgtgcttggaagagtgctaaacaagcaatcgcagacgttcaaagctcattaaactcaagctcacgtaagtttgatggcgataaagatgtcatgggaaaaacagttactttcaaacgattagacagcattcgcgatacattctacggacgtgtagcagaattcatctttgaagacgttaaaggtaacatcttctcatggtcaacaaagttaaatggctacgttgcttctaaattacaagaaggtcaaacctactcaattgatttcaaaattaagaaacaagtaactgatacagtcgcagatattaactatgttggactttcaaaataaaggagaactcaaaatgacactattagataactacttaaaagataaccgcatcacacaagctatgattgctaaattaatgaacaaaccatcgtcatcagttgcagcaattattaactcaaaaattgatattacagaacaaaataacattaaggcaatcagagctattgccgacattctaggcaaaacacctggcgacatcttaaatgaattaattaagttggaggaattaagcatggcattcaacgaagagcacacattcacaattttaacaacgatctggaacgacgatgactcattattcagcgatgaagtgtatgaatacgatgagtttgaagaagcatgcgcagcgtttgaagatttaatcaagattaacagaattgacgaaaaaattacccttgatttatctgtcgatgacgacattgtaatgagcgtcacgcttaaaaacaaggatgaaatcaccgacaaatacacagataatttaaatgtgttgccatccgaagttaaacctgctcttttaaaagtagcccgaaaatacgaaattagcgttgattaaaaaagccataaaaaataagcctaacccacaatttagtgagttaggcttttataatataggtagaactcggatagacgaccaaccccgccctattcatataactaccacgattctcaaagactgtacttaacgttatttgctattcaatgtataagctctcaaactccgatattttagagtaaaaaaatctaatcccacaattaaatgagattagctttttaaatctagtttccaaatagatccgtagtattgattgttggtaataataccgtttgggctgaatctaatccagatatcatagaaataatactccttacataggggaacaatattgctgttccatttactattaatgattgggcaacctttttttcatcatttacaatatcttcagagatagaaaaaaatccgttaatagtcatagatattccacgatttttactatttgaatttttttcaactaatatcgaaactttaacagttagcttagcatgcaacttatctttagttaaagaaaaattgggttcgaagacaaagccttcactgtagctctttaaagtctccacgttatttgtataatttaaatcttcaatttcataaccattcagctttatgtatggttcaggattctttttcatttaatatcacctcaactgctaattattataccacacaaaaaggggcagaaatttctgccccttcacttttattaaaatattcgaattcattagaatcaaacgtttcatcaacgtcatctccagaagatataattttttgtttaacatcaacaacctcattaaaatcttgattatagtcaatacattcattgcttgaattcaaatgagtattttcagatacaatcaaattctttttaacgaaatgtctaagaataaatttaatttctcttttaagatttttagattctaattcattaccatattcaacatataaatctagattatctttcatcttttttgagagtgcatcattaaattcttggattaaagattcattcatcattttaatcactcctcttctaagataaatactaccataattctattttattagcttactttttcaattattttttcatttttaatagcgaaatatgggtattcaaattcttcaaattttttaaccacaatatctggacatcttttttgttgtaaatcaaaaattagaaaaaggaatacagcgttcatttcaggaatctcttcagcgtcaccgtcatctaaatctaatacatagtttatggcctgatttttcaaaactttatattctgcttttgtttcgtctgaaaaccatttactttcaagaaattcatcaaattcaaattttaagaaataaaataatttttctagaaaatcagtagcatccaagtttaaaatttctttatcagtacactctatctttacaacagcatcatgttcaggagtgtactcatctgccccttcaaggtcatcaaaacaataaatcccttctcccaaatatggaacgcttctcattcctcgaatactacttggtaattttatttttcccccagcctttaattcgggtaataccgcatctatataattaaccatattataatgagttatttgtattttattatttttcagtattgcatctcgcgcttcttcagtagtactatgataaaattccacaaataacacctcgtttattaatccctaaaattataacatagcaattaagtaatataaaattatcattgtaagaatcatatcgaagcaaataaataagcctaccccactattaaaagtgagataggcttattttttgcttatttaaatgtcccccaagcaactgcgccttcacgtactggcaagaatacatgcacaccgttgtatacatgatggatcattacataattgccaacacgtttccatgaatcgtatttccatgttccgtaagctggtaagtagccgcctttttgagctgtaaagcttgctgcaccgacgcgattcataatctcggtgtcaccatttacgaaagtaccattttcaggggtaaaaccagcgggaatattcgaattacttggcgttgtgggattgattggcgttgtgtttgtcctgctaccattttcaggcaaaccagtttttaaatcttgtgcaaattgggctttagtaatcccgtggcttgctaaataaccatatgggtcttgatgatcaccccagacattatcagtaatccatttgtgcgtcacgattccgtaaccggtatctaaatcggtactgataccaaacttattagctgaatcccgcaataggttaacgtaaactgcgtaatctactttaaactgagtagcgttagttgtgcgtgctaattcaacttgaaccggtgcattggcattgccccatgtcccagcaccccaacttacataaccatcagcgccaactcgataaactttaccaccgtcaccgacgacatattgcgtataagcatagttagtgttccaagtgcgtttcatatacgcggcgttattaactgctggcgcataagtcccagtttcatgcgcaatcactaaccgattattagtacgttgattagagccttcgttaatgcctaattgataagtgttattgaccgagtacgcttgtgccccgccaatcatagctgttgatgaaaataaaatagccgccccaaaggcgactactaatttatttaattttttcattttgaatctcccttcgtggtgtcatagacgacaccgactaaacctaagattgtaagcaccgtattaacgatgccttgtacttggctagctaaatcattgctgaattcaatcccgaaaaccttggcaacttgctgaactaatacgatgactaacgccgtcatcgaagtccacaacacttttgagtgccaatctacttttttaatcattaatacttaccctcccataaatttattcaataaaaaaagacctattggaatcaagatggctgtaatagctgtcctttgagtccacttagatctatcatttaaatcttcaatatctttttgattttctttagcaatcgaataggccttactagctttgattgccgttgaatcaagattgctagtgttttcttcgacgcgggctaaccgctcccgaatatcgattaacatttctgtcacgtttaaatcatctttatcgttgctcaaaccatgctattcctcctttttctgtaaaagttccaatatcaaatcaagcttagcgttaaccgtcgctgtctcattactttgcgtcgcatcatttacaattgctgtactttgagcaattgtttctttaatctcatccgcgtctgctccttcaatccaatcattggtcacataatcccactttggcttatacatagtgtttggtgcaaaatggtcacattcaataatcagctcatcatctgtgctgcccggattaacatcatcgtagttaatcatgtagccgtttttatctaacgtaaaaaacatattatcatctcttccttaaatgtcttgtccaacaaatgtgtacccaaaacttgcgtgttgcccagtatctaaaccgcggttgacgataagtctgccacctgtactcaacattaagttaccgtagccgttggttcttgtccctgtgtctccaccgaaatgaatctccacgatgaactcggtgtgctccggtctagcccatgccggaaattgcgcaatattaatatgtgctgaaccaccattatgggcgatatagcctgagaatgtaaccatcttcccacgtctagtaatgctaattggattattccatccagaccacccatccaaatactgaacttggtttgtataattctgatacacgtcttgttcgtttaaagcgcctgatacacgaccatcacccaattgtagttgccccatctgaagttttgcagaacgaattatagttcccttagggttgcgaatgattgactctaacccgctggcatttaacgtcgtgttccccgtctgattattttcgggaaatttccaagtgatatttacagcgccatctttaatttgcgttacgccttggaagtgattatcgtctggtcccctgtaatcaaaattattggtgaactctgacccattaatcgtagccccgttaattttgttcccgttcaatgtgccgatgttcatagccgattgctgaattattgaatcagcccacttggtgccgtcccatatcttaaacgcattaatgttgccattagcgtccttaacccaccattggtcgccattctttgggttagtcggtgcagtggcttgacggtctattttagttacggctgcaatcttgctgtttgtgtccagcaatccttggttgattgagtcaatttgttgttgggtgtcttccggtgcagcctggtggtcagtcgccttattgccacgttcaaactgcatgttatatacggtaactgttcttgtggtagcgacgttgtccatacgaatttgaataccagttgccataccgctcgtagtccaacctgatttccattgaactgtatacacaacgtgcccgttgtccttcatagcaccgtccaaacctttgaattgtccccatggtgtgtcgttaaattgagggaatataatcccgtacgcccccgtaccaacacttatataatcaaaggacacggttacataatcaccgtcattgaaaggcgcttgcttgattgttccaaatgtgaataaccacttcatcgagctagtctggttagcgctcccagacccttgcgcttgccacgaggtatttgtgtcagctaaatagttgcgcccgccgattgatagtgccccgaccagctctatccaaaaatacttagtggggtcagttgaatcggcttgcgtaaagtcagtataggttcctagataaccgcgattagtagggtcggttgcgctaaagtcaaccttgccgtcttttgaacccgcccatgcttgatggaagtatggcgtcctaccgtctgcaccgggttttcctggtgcaccatcggcacctgtactacctgttgctcctttttcaccagcttttgccactgagtaaccagtctcgctagtgttatccgtataactccagacggttcgcgtccatagataattgccaccagggacactaggcgggctggatacccaagtaccggtcggagcagtcgtgccagatgctgaggcttggtacgtgatggtggttgacttgataccgacaccaggtttacccgctacgccgtctttacccgtagcaccgttggcaccgatatgcccaacggaataaccaacctcagtcgtcccgtccgtatacgtccataccgtccgtgtccactgatactgaccggcaatcgcagttggagatgacacccacgtgcctgttggtgcagtcgttccagacgttgaagcctgataagtaactgtggttgacttgacaccgacgccatctttaccagcgacaccgtccctaccgtcagcgcctttgattaatgaccaagcgtacttagtgacgtccgttgagtcagcttgtgtgtagtccgtataccagcccatgtaaggcttatcagcaggcgactggctaaatccgccaccagtatcgttgtcagcataagcaacgtgagtatatggtgtcctgccatcggcaccaggtttgcctggaataccttgagcaccgtccttgccttccggacctgtttcacccttagtgtacgaccaaacgtaatcgctagggttgttgctatccgccttagtaaagtcactataaacacccatatagctccgcccagtcgggtcatcaacactaaagtctttcgtcccgcttacattattagcataggcgaagtgagtataactagtcttaccgtctgcgccagtggcgcccgggataccatctttgccatcattccctttgattaactgccaatgtccagcatagtcagctgagttgtcacttggtacgcccgttggtttattagaaacaatcgcaacgtatttagtgtcagccgttggcatagccgtcataccattacctttatcgtctttggcataacgtaaccacatataattagcgactggtttaagtgagttcatttgttcttgtaaagcgcgtaactggtccgaaatattgctatacaatattaaaaagttaccaaaagtagccttattcttgcttgagtcagtgtagctcttttcaatttgcaaaactcgcccactcaaaagcaattcaggcttataatcgtggtcaataatcgttacagtgtcgcccagattaagactagaatcaacctttgccaaatcaacttcatagttaactttcggttggcaccgttctttgagttgtgttaacgttcgatttaatagctcttgagcatcttgcgtgtcgtagtcgtaaaagtcttcgagataagtatccttgatgttaaattgctgattagcaacgcgtgcatataaaaaagggtccccagcaggcgtaaaatattcgccatcatcgtaagtcaatgacgaaaaatctacgtgttcttctggttccccttcaactgggttatctttttgaatgacgccaccgacgccttgaatagcggtcgccaactctctgatttcagttgttttacgaatatcattgacagtatcgccatagactaattgcacatcagaccggttggccccgcgttgcttatacacgttaacaacctgcttagtgacttgcatattcttgaattcaactttgaactcaatctcagcatggtcaaattgggtacagatagataataaccgctttaaggctgtgtctcgcccgtcccatgataatgttcgactcagattgctaatctcgttaacgcctaacgtccacccagtatcacggactactttgtcaaaataaaacttaaacggctgagcgctacccggcgatgcccacgagttacgcaccttgtttagcaattcaaggcctagatcttcacactcaacatctaaggagctgtgagtctcatcagtcgccataatcgtaaacttccagccttgacctttgtcatcagccaaaactacatagttaccgcggactaagtattcagaaccatcttgattttttggaatcgtaaaattatacgtactgaccccagattctaggataagcgtatgtgtatcattataataattttctaaaaccgctagtgtatgattcattctgtcttgaacatatagcatctataaccacctctctctaatacgagctgttacttttggaatctttgcaaaatcagattgggctattgttataacactttcacccggcggtgcgataattggacgagacccgatgtcttgtaaatcaagcaccataacattgtttagatatgtccgaataacgttatcattagcatcaatccgaattaaatcaccaatcttaaaggtgttaggatcatctgaccatttatcgacgtttagtttggtaaattgcattaccatgttgtacatcggcataacagccgttgatttgccggtaatttgatacttaccgttccagtaagtaacaccagttaccggctttacatttgcttcaatccagttaattgtctccgatgcaccgctatttagattatggattacaaagctaaacgtgttgcccatttttttaatatcgcagacgccggtaaagacgtcccaccgcttatcttgcgcgtgccaaatcatctgttcaccaacgtaacagataacagttacactcttgttagtctgtccgtttttgacgaagcgcacaccagcaacatggttaccatctttatcagtcaagttatattcttgaataccaacatcactaacggtttctgcacgagcacggccgtaagcatagaactcccagttgtcagcgccaacaacaccgtttgaatcttttggtagttgctgataaagcgatggccccgtccaaccttgttcagccccccaaccagtagttgcggttcgatgatacacaaagccaccttcgcttggtgggacttcagcagtcgtcattgtcccaccttgatgataaccctcgttagcccggccccaaatataaccttgattgagtttccaactagcgccaatcccagtcccccagccttcgttaattaatctttcagatttactataagcatgaccatcaatctctgccggattaccaactttaataattgattgtgagttaactaagcctacaaatccattatcagactggctctcaatactgaaacttactggcgttggatacgtaccgttatttttaacggtgatcatgttaccgacgttggtaaaagtcttttcaacattcgcatatgcaaaaggcttggaacaccagaaagttaattctgaaacgacatttaaacgcccctctggtacatcgtcggccgattcaaaagtacccacaaaatagacagttttatcatcgttaaaactaattggaacctcagtgcctgctaaaagcgcatttaactttttgaacgccgcgcgaaattcttccggtgttgctgatgttaattcatatttcacagtgatgcttctactaggatatcggctattcattaactcgtccccatcagaatccccaacagtgattttattgagttcccgaccgattaattctcgtccttgtacgcttagtgttctgaaaccgctgatttcggtatccaattgaacgccatcaactgtgacggcttcagcaggcagttgcccgccgtcttgccctgtatatcttcttaggtctctaaatccgtacaaattaagccctccttatttatagccacgtactcgattctgtctactatcgattttatctagttcttgccgcattggttgagctgtcacttttgcaacttctctgccgttgatgtttactggtacttcaacggttaatgatttactgtaattaacgtttaatgacgcatctaaactggttgtttgcaattgattattcaaactttttagcgaggcgttgaacggtgattggtcaacggccggaatagttaccatcgcagcgttggctagtttctcgctaattttttgagcaaccggaatcataccctcgatgccgtttgagaaccccattcctgtatacatacctaatttagccatcacccttgatggggagtgaattttaagagcttttctaatgccgttagtaacagtgcttgcgagttcactgattttatctttgacagaaccaatcatttcgctaatcccattgataagaccttgcacaatattcttgccgattgaaaatagatttatttggcttaatgagttaaaagccgagctaacacgtgaaattacttttttaacgcctgctaccataccatcccaagcgctgattgctccgctagcgatagctttagcaatacttactacggtagatttcaacccattccagataccgacaactattgaaaccatgctattaaataatacagaaacaccgctaacaaaattggatacaatcccagtaacaatcgctactaagccgttccaaatctggccagctgcatctttaatgctgttccaaattaaagtaacatcagatttcatgttgtcgaaatcaccagttaccaaatcaatcagtagcaatattgggcctaaaataacagccttaagaagattaaaagccccggacgcgtaagaaatgagcccatcccaaattcccccgagagatgctacaattccgttccaaacactagttgcaacgcttgcgataccagcccacaggccagaaaagaaagcagatagtgcactccatattgcttgcgcagtggccacggttgcttgccatgtgctcgttagaaaatccgtaaagcttgcccaaattgctttgccactttctgtttgggtaaagaagtaaactaatccagcaaccagggccactaaggcgatcgttattaggacaaacggattaactgccataactgcgttaaaggctgtttgaatcgcggtcccaatcttaacaatcgccgtatatgcgttgatggcagctgctccaattttgaaacctgttgctattgataaagcggcagtgccaatcccgataagtgtggatctaacaatatcgtttttaaacatgccatttaagacactagcaaagccttttacaacaccaaccgttgtgctaatagccgttttaagcgtcgtaaatgccaatgcccagtcaatcgagttaagtacacttgctaatttgtcgccaagcgctgtagccaactcgcttgttttattaatgacgctttgtataatgcttgaggcgggcccaaacactttagtaaacgcaccaccgacattgcttacggcattcctaaacgcttcgcttttagcgtaagctagagctaacatagcagctagtgcagcaataccaactgcaataagatttgcagcggcaactattggcgtcatcgcaagccggattgcattaaaagagcctgcgacttgccctaaaataagaagaactggtccgatgattgcggataatccaataaatgattgtgccatcttcccaaaagacgaatcggattgattggctagcgttaacactctattaatcatgtcaaggattgctgaattgacaccacttgcagactgcatagctgagttgcgtagcgcttcccagttaccaccaacttgttctaaagcagaccccaagttttgttgcatatccttcgcttgttcgtctaatactttgttagcagccgcagagctgcttgaagcgtcattgatagccttgctcatcgcggaccagctttgcgatgcattgccgctctcgttagtcatcgacttaagcaatggcgacattgctttaaaacctgctgtcccaaacatagttgtcaaagcgagctgcttctgcttatcgttcattccatctgtcgccttgcctacttcacgtagaatctgaggtaaaggtttcatcttgccggcagaatcgtaataactaatccctaaactctcagccatttctgcggcttgtttagacggtttaatcatcttagtgatggcaaagttcaaatcttgagcagcttgggctgcaggcaacccgctattagtaatcatcccgattgccgttgcagtatcttgcattgtattacccgtttgactagcaatcgaaccaacgtcagcgaaagcttgttgcatgtcttcaatcgaagcgttagacacattggcggcagttgttaataccgcagccgcttgtgctgatgatccaatactatcgccccatatgttcatagcaatctgtacaacccctgcagtagattgcaagtctgaacctgctgcagtagctgccttagcgattgccgggaactcatccttaattgtgtcgattgaagccccatcttgtgccatctgaaccattgcgtcagcggcatcttgcgcacttaaaggcaattcagcgcccattcggttagctacatcggcaagctcgccgatgttttttgaagtcccgccagcaacgactgctgctttatttaaactggcttggaagtcgccaaatgatttaagagacttaacgcccatagcagttactactgccccagcaaccgtgctgaccttgccaattttttcgaggctgttgcctacttgtgacgtgacgctatcaaccgtcttagcggctttagcaaacgttgaactaaatctactgtcgaccgcgcttaaaacagcttctacgctatagctttcagccattcattttctccttcctccgatctaacggtattatttttccttgctttttaagctcgctaaactcacgcatacgttttgcgaatacttcgccttgacgtttacgcaaatcagctttagataagtgtgatattttatagtccgcttcaaacgcagaacgcactcggtcaatctcggattgcctatcgaaaaattcggtaaatgatttaaacttcggacgtggtttcttgccaccagtagtcgcttgaacagcctgattcatccacgcttgaagggcgatgctctcttgctgttctgcctttttcaactgataagcctcaagccttagctgatactcaaccatcgtcatgcgctcaatatctcggatgttggaaaagcctagataagctagcgagtttaataagatttcgcggtattcttgctcacttgtcttattgtcgccagaatctaggctttcatgttttttaaagctgcttttaaggcatttgctttatcgattccctggttgacttcttcaaacactttttctagttcatcaatcgattcgatgctatcaatgtaatcatcaacatcatttcgacttggtcgtggactgttcgttgccgttgctgcataaatggcatctgacaatgttgctgggttgtatgtttgcatccctggcagactccgagtaagtccgaagcctaattgaacgccgtctttattaatccctgccactttgtctagttcacgtacaaaccgcacgccaaagtttaattcttgttcttgtccattaattgttaaattcataaataaatcccctttaattgttttttgtaataaaaaaagaccagcaagcttttacttgcctactggtcttaatagttatttagccgttacttttgcgccatccgctgttggtgcagccgctacgcttttaggttctgatggtttgctgcctgtatcaggcgcatttgtgccagcatcgccgtctctccacgatgtgccaccgccttgagcgtcttcgtcagtaactttacccaagccgtggaagatgtaatcaatctgttcttgagcatcttgtggtagttctagccacccgcgttttggcgttcctgaaactgaaaaagttgtgtcacgagttgagttatcgtctggatcattgtcgttagaatcttctgaaacggttacttgcatgtaccatgcgaagtatttaccttctgcgtttcggcggttccgataaacaatccagccttctagtttgatgccatcgaacaatgaatcgtacatcatatcagcaatactagaagtattgttgatgaactctacttcgaaatcagtttcaactgagcttgatgttgttacaacgccatcttttgtttggttagtatcgctgtcgcgttgtgggtcaaatgacaatgatgtttgccaaggcaatagttgcccttccatttcttttgccttgctaagcgggcggaaaaaggcaaccgtgtccatcccttgcaagtatgctaattcgttatcagccatattgtacctcctacataatatttagatttagctgcacctgtccgcgattaaacaccgcattaggtacgctttggtcttgagttaattctttgctctgctcattggcacgcccgtaaaaacggtagtgctcggtgcagatagtcccgatagctgtatgaaaaaagcgctcaaccatatctgatacggttaaacgctgttcatcatcgccccacacgtcaattgcgattatcacattaccgttgagtgacgccttagtcatatttgggactacttgtatgtcgccgacaacaacaaacgggtacatttctggtctgttgtccatcggcagatggtcatacgtgttccaatgattagttaatgcaaatttgaaaaagtaatcgtataactcttgctctggtgatttaatttataccacctacttcattaataatttgagctcattcacaaattgaattttttgtgccataaatgttggttttaacacaggtctagcacgcataaagcgcgtcccgttttcaagatagggattataattcatgctcataccgacaataccggacaaacccccatcagctatttctagcttaatgccacgcttggtagcacctgtcggcttaacaaaccgcgtaccttcgtaatggcctgtgtaggccgttgaagtccgttgttgtgcctttacttgaagttgtgcagtgtgtttcttaactagagcttgaacaccagtcaatttctgtcgtttctccaacccagcaattaacttatcggcacctttaagccttactttggacattggtttcacccacaatcaaagttgcattcttaagtggtcgcctatcagtctgcaacacgtaatgagtcgaatcatcatcgatggttaaatacgaccaaacgaacttaactggttcaaccattcgcaccacttttgagttggcatctagcttaccaaatagctcgttgctgcgatttgtgccaatatcggtaacattagccataacggtagctacaagcgtttctccgccttcatattggcttgtattggggttgtagtggcgttcagtctggtcgtaaaacttaacctcattggtcaggcgcattagtcatccctccgtagccgttaataaatgcaacattgccaaatgatttaacgtttttaccgttgtcttctcgccactggttaatgtcgtctagaaattcatcgaagtcattagtgttaaatgtgattgattcgccttcttgcgagtaagaactcatgccttcgtttgctaggcgattaaagcgccgtatacatacttctaacccgatgtagtctaattgctccggaaacttctcgtcgctcatcaaagacaacttaaaccgcaatgacttagttgtttgcttgatgatcagtgcaagtagggggtcactttctgtcgactttatctgtaacatcgtctttaagtcttgtagtgttactggttcatccatctaatcactacccttccgcaggcaatacgttaaatgctggaacgtccactttatccgattcgttcgttccatcgctaaatgaagctttatagtcaccagctgcaactttagtcccagctgctaaaccagtaatagtcgcagtacctttgcctttttcaccggtaataattagttttccggttttgtcatagattttaagcatctgattagagcgatcttctgctgccatttaatcccctactttcctgtaattaaagccccatctgctgtcggtgtcgccgacaacgttggggctgttattttgacgctgtaccgccttgtttaatagttccttttaatacgccatcagtcatttcagcaaacaaagcaatgccggcaaaaatagttgattggttggttaaatttgttgtgttgtcatcctttactaaaccaattaaacctaattcgtcagaaataacttgtttgttttggaatactttcgaagcttcaccgtgtacatcgatgtattgtagattaatgttgtcattaacagtcgcgtagaacgtgcctttaggaacggagttgttaatcattaccgtcacgtttgtaaatcccttgagcaatgtcatgccaaagccaacagattgaccattttcaatgactgcattgcctaagtagtcgcctgcatcttctgggttaatgaatacaatagttccgatgttttcatcgtcgaaaattgagcctaatttcccccatgatttgccaaaagcttcttgcaaaccggatacttcgcctaaatcagttggcgctgtggctaaatagttaaaaaagtctgtgcggactgatttttgaatcttgttaagcactttcttgtcagttgtcgtaacagccatgtcataaccaacgcgttggatttcttccatggttaccgccttacgccactttttgaatcccactgtaaattcttggtctttttcgcgtgatacatgtgttaaaggaatgtcttcgccctcaccaattgaagctggatcaatggctttaccttgaccatccgttgggtccgtcacagtgaatttataagtttgaattgtattaccttggcgcatcggttgaggacgcgtaataccaagagcttcgcgaaattttgtcaaagaatcgctaaatttgtttacgaaatcaacggcttcaaccgtccccatatcaggtgttttaataatatttttttctggcatttatatgccctcctttaattaaataattcgaaattgtctgcaatcgcttgtttccgtttaaagtcatcaggaattgccatgatttgctctctggtcatcttcttaacaggactgccagtttcctttggcgttctgccttttaagaatccttgccgcgtttgactctcgattgaattggcgaactcaattaaggctttggcgttggtgaacgtcttatcgtcgtcgctagaaacaaccatttctaaaacgtcaccgccaacatttaatccggcttccttgaacacagcatcagtttgcttaatggattcagtgcgcgctaacttatcctcaagctctttaatgcgtttaactttgtcatcttctgcctttttcgccttctcttcgtcagaaagttccttgacagacttgccagatttcaagtcttcaatttgcttcaaagcgtcatctagttgggccttaaacccttgcttttcggcttgttctttgccaattcgtttttgaagtttagcaacagtcttgtcagcgtccagttgattctcttgaccttccggattggtcgtttcatcgccaacttgttctgtcttgtctgccgccgtcgcttcgatttgttcttcattttccatattgaaaactcctttctcgcatttaacgccgtgggaggctactcagttgttcttttagccctgcaagcaggaaaaagggcataaaaatagcaccttagcttttactaagatgctttggtggcaattattaaaaaataaacttatcccattccttatcgggcaacgcttcaatgggtgtattgctcgctatggcggcattaatatctgtttccatatttttaatgccttttttcaattcatccggatgtaactcaatatttaacgggtcccaccaacctagaatttgctcgggcaatggttttttaaagtggtcttcgtatttcttcgtaattaaattcgcttgtttaaataagctctcaatgttgctcatactatcacccctttaaaattattccgataattaaattgagatattcgggatcagatgttattaaccttctgacgtatttgccattaccaagcgcctgtatttgcccttcgccaggttcgaatacactctctaaccccatgcttagtacttctgttccgtcactgtaatacttgccaatgtacggagaaatgaaatcatccttttttatgcgctcacgaggcccatacctcgaattagggaacagcgatttaagtctcacttccatctcgcctttcgttctggcgtcaacaaactctttttcgagtctaacaaggttcgggttgaaatagtctaccatatgcccaatctcgtgccatgcagttgtagctctatctccagttgaataaatactaacgccattgccttgtgcagcacctggtaataagcgttttccgcttgcagtcacaagctcctgttggaaaaatcctctcgacttgttcttgccagcaaaaaacttcttgttgttttgcattacgtattcagcccattgttttggatagtgtgagaatgagttttgcagttcctctttaatgcttctgttggacttagtataccatgctgaatcaggtattttgccgcccatgtcgcggtatttggcgaacgctttagttaacgcgtccttgttgcctaacatgccatcgacaccattttccttgttgaacatagcacctaaattaactagatcttcgtaacttgcagtagacaaatcaatcttatccatcgcttcttttatgttgtcttttgtttctgcgtctggtatataagcggccttagaacaccgacaatttgcatgcaccgggatagttggtgcatcgtcgataggatagataccctctccaccttcgccatcacttgcaatgcctaaacatatcttgcatgccgacggttcagcaatccatttgcaatacttatacccgtacttctcaaagctcttcatttgggctacatcttgaaccctagcagtctcggttcgcattaagcgctccgccatgtatctggcattgtcaaactctttcttgaattgatcacgtagattgcgcgctaaaacgtttgggttgatgccttgtatcagtgagcgagtaagcagttgctccagccgcgatttaagcgtgtcattgtttgcccaaatcctatccgaccatgttgcgccttgaaaatctgcattaacaatcgtctgcgcggacttaagtacatctttaagctgctgttctgataaaataccggattgacgctcgacacgttgttgatatgccttagtgagcttattacccatcaacttttcaatcttgctgtttgatttagcaagttcaacgccaatttgagacttaaggtactctaatcggttaatccgcatcgtagcgttgtacagtttcaaccgctcattagcgtttgggctaaagtccttatccgcaaccatctgcttagccgttgattcgaaccctttaacatcaaaagcactaacacgtgccatcgcctcagccatgctgatattttggctcttagcgtaactagtataaaaagcggtaatgtccttattaatatcaactaaggcgcgattaaattccaactcaatctttttggcaaccaaagcatcatctttaatttgttgcattatccatttttcttcacgttcagcccaatagtcgttgtttgccatcactattgttccttatcattattctgctgattgaagtcgtagttagctggattactatctgctaattgtttatcagcttccttttgttcatcagccatgcgcccaatttcagccttcggatcatcaacaatagatagtgtagaaagctgtgtttcttttgagacaattccttgcagcttgctagctgtgtcagcttcatcagctaaattaaccggcatgttacgagtgaattggaattttaaatcttgccatgaatcagattctttttccggcaaaattgtccctgctttaaaagcgattctatatagtctgcgtaacgattgagtaaacttacgctctttacttgcagctaagtttcgcatcgccaaaagtttgtattggagcgcaacacctgaactattaccgctaaacgcttcgtcattcaggttaggcaccatactgatttggaaaatcatgctcgataagcgatcaagtagatgttcttgcatgctgtcgccatctggcttgctgataaactcaacaactgcatctgctgcggcttggtcaggcgagtaaataatgccgttatcagttaaatcaatatctggctttccatcgccgtcagtatctaaatccgcacctagaatctttaaataaccattatcaaagtattcattttgattagctttttgactcagcgctttatccaacccattaatcagcgtcttaacgttctcaaacacaccttggcgctcttcgtttgcataaaactcaaccgctggtacgatgccgaattgattaacgctaggttcatccgattcgataaaaccgtcaccactaaattctttgatttcatctgctaaataaacagtccctgagagtttgttgccctcgtcgtattgataccggacaaaagcaactggtatgtgaccgatagaatcgtcgtagatcataaaagcattaagtggtgaactgtaggcaatttccgtttccgaatcttcattctgatataaaaaagcaaacgaacggccataaatatccgtctgtttgcttaattcgttgagcttatcttgtagactgttagtgtcattccactgctgtaagttctcattcttattcttttcatcaatcgtaatctttggcgggatacccataaagaacccgttaaatgtgtccacaatatagtgtgctagattggctactaacttattatttggtccatttttttcggttgtatctgttagaatctcatgatcacccaggtacatgtctaaattggccttataatccttggccaatgacccgttcgattgaataaactcttctagatcgtcaaaagctacctcttcacctttcggatagataaaagtcgtcccgtttaaaagcgaccccttcccgttaactgttaaatttttgatatttatcacccctttaaagtacgttattaatcatcacagctttactgctgctatttgcgtagtagtcttccaatgagtagcgaatagcatcaataatgtggttattagcgtctacaggcttgtttaaccacttgcccatcttgtcttggtcaaatacatacgtgttgaactcttcgattgtgtgcgtgcagctaggatgaatatgaatttttagcgactgcatgaaggtgatacctaactcgactgagtcaggcccctttttagccgctttaattcgtctcatgcccttgtgctttaattctgcgattgtcatcgggctagcagcatcagcatggatagtagcagctaataagttccgttttttaacctcaccgataatctgttccgacaacaaccctgtcttgtacaattcgccgtaaatccataactcgtgattcttctcgtcatacacggcgcttggcaatgtcgtagggtcgtgtgtaaacccaaagtccataccgtgaaccgtcttgccaatctgttgaatcttcttgtctatgtcaaaatcaactacgtcaaagttttcaaacacaagtccttctgatatgccccattcacctaaaacagccaccttggcacgtctggggttacgaataagcatctcttctagtcctttgatatatccgtcatctaagaacgggttattcttataagtcgttgtgtaggctaatacgttatcgcccttagtcttctcatcgaagaaacgaggtttaagccaatgattctcgttccacggattgaacgttaagattgtttgataaaacccatcgggatcatcaatcttcccccgcaaactttcatcgacggtattaaacgcctcttctgactcaagctggtatgcttcttcaacccacatacgacataaattccctgtttgaactgaaatagacgtgatggacaacggtttatctaacccacgaaaaataaccttctgaccagttggcttgaaggttatctcaggtaaggaactattaaatttaaatagatgagccacgcccatcacattggacactttttcgagcagcgtataggttgattgtctgttagtattggcgaaccgtcttaacactaaccaattaacataaggcttggtgataatgtcatagattactttacgtgcttcggcttcgctcttgccagaaccacgtgaacctttaatggcaatgtatctcaatcggctagagaacaatggcgcataggacttgtctaccatctctggcaggttccacctaacttccatcagcatcatctccaaacgggacaatattaacagttaggctaccactgccattctctttaaccgctttagcctcagcttccttaatatcagcctcagcttcgagctttctaatctgcgcttgagtaagcgggttctcggttgggtatcgtttaagtatctccttaatagcagcaatgcgagtctttaaatcagcttcctttttcgattcatacacgccgtctggagtaccgactatgaccgtttctttctcttcgcctttagctatcttggtaagtaactctaaagcttgttgggcgctcataatacgttctgaggcaagctgttctagcttctcatcaatatatgttttaacactaagtttttctaagttttggctgccttgaacgtgaggctgtttatatccggcgactttagcagactgggtggcgttacctgttttgatatattcatccgcaaaccttttctgtttttcgcttaacttcattacatagcaccgccctccttcttattgtttttctgcacaaaaatacgccgctcattatctgaacgacgtttctcatctatcttcttctgtttaagccacttctctaatctggcatcagatctcgattgccaatcaggttctttcttatagctcccttgattcatataatacaatcggcaatcaccacctttactttatgcattaaaaaagccataaccattcggctatgacttatttagttctgccattgattgtaaatgttaactgtcctataatgaagctgtcaggcgccccccaaacacctgccacatattggattatacttccagatttcgactgccttacggtggtcgttttttgttgcactaaaaaagacagccgttaagctgtctagttatatttttatataagttataggttgaccatttcacagcctaattttaccaagtaatcattaaccacttcattgtgttgatccaaaaacttaacctttttcttaagccttatagcatttctcactgtattcatagttccacttttttcccctgtttgtataacaaatatctcatcggataaatgtgctacataattatttcgagttaaaaaatttgatttataagtattttcaaacgggcccactgcactaattgccaacccctttgaaaatatctccttaactaatttttcattttctttaggatatattttattgaaatttgttggtagtaccgctatagttttaccaccgtgctttaatgtctctttatgaacctcagtgtctgtcccctgtgctaacccacttattattgcaaaatcattttttacgtatcttttaacaacttctggtactttatgtttatactctgtatcaatagcccttgtgccgatgattccaacgaagtgtttattatttaacaactcttctgatccacgtaaataaaaaaataatggtcgaatatctttagccataaatttatccaaaatattattatcatatttaaatagtatttttgaattagggtattcataaaagtagttaactagttcattttttctttcgttaaggaactccataaacttatcggagtccactaaacttatatcctttttagtaacatgtccttctaaattttggtttaaagcatattcattgctaaatattattctaggaatattctcatctttataattgttaaatagccacattaaaaatgtatcgctaaaaccatattgttttagtatataaataaaaactcgatattgtgttttcattcatcaccagttccattcaaaatgtcgtatattttttttacttcatctttagctgcagtttctttaacggcattatcaccataggatatatcaaatctatctctaacgtatgtatacccagcttcatagacatctcctgttatttgataatcttctttctgataagttactccattatatcttaaataacgaccaagactaacaaaaattatcttctttacacctgttttctcaagtaaattcctagccatttcagttgttgcaccattagttacgtaatcatctattagacagatagttttacctttaagcttacctttaaaatatggattgattgtaacagaatcaaataatcgactcgcacccatctttatgcgttcctcaggagatagataatggcttttctctatctttttatatctaattaataatggctcactaactctcttacctgtcaaatgacgacatctgtcctttaattcgacaagtacctcactaggttctgtacctgacgaaggcattgccgcccaataatctatattatacagttcttcatattgcatcattcctgaaatcaggtgaaaagtaagcgcatctttgtaaacctcacttccatgtttcagtacttcttgaaattgatctagtacatttttttcacgctcatctgcccagtaactattagcagacatcaacgaaatcaattctgatttttcacttattttcaaactataaaaccatttgtgctgattgattaatattttcaacatacttattaattggtcaggttcttttatcttaattccgtacttctcagcttctacttcatgttcgctgctccactcgggattaatatataataatttatatgcagcagctatatataaatcatcattacttggacctataaaaattgatttttcgttacttatacttttatctttaaataaagatcttatttcatgtctaccatatacctccacattcgttaatttttcttttagatattgttttaaatttcgatcatgtgtcactatggatatattaatattcaaattttttatagtatctaaaaatctatatatattaaaataggctttatacctaccatcctcaacatcaaataatgaacgtcctgcaaaataaaccgtccaattttgttgcataatatcccctccaaaatcaatttatatacgcaactttattaaacactaaaaaagacaggtattcaacctgtctcatgcgtatataaatacctggagcaaagataatgctgacacaaatctgataaacgttaaatctatcagcctgtgcaatatcctagtcgggactcgaacccgaatcgtgaccgcaggtgcacttccgcgccgctttaccaattaagctactaggaccatgcccgcattcgataagtgaaacacaaggaatctccttcccttgcgtattctttacaggcaactatttgataatactaatttaacacgtatttaggggctaaaagtgccaacttcgtgccaacttattgcatgcctaactctttagccaaatctataaagaagtcttctctgcgcctgattagcgtgcgccgactaacattgagtttatatgccacaccatctagagttaatcgtcgcttattcataaaataaagttccttacacatttgatagacaatgtctgaattagatctatccaaacagtttgcaacggctcgttgctgacgcttcatttgtctaatgcgcttatcttcatcaatcctaataattgtctccgtcagacgttcctgttttcctgcgcttctgccgccaccgatattctcatctgattcaacatagggatgacgaatttcttcttcgcattccttgatatattcattgtagtgtggatagtcccgcaacatatcttcaatatagttaaatgttgatcgtctcacgattagcctccttcaacctttgaattgtcgcctgcgcgaattctagttctttttctaaatccgagttataagttgccaactgcttcacttgcttctttagccacttgttatcagctttgagttgctcatagttgtccattagttaacctccaacgattctgggttttcaaatttatatctaaagctataacctttcaccgttttacgtttacctctaagattgtccgatatgtctccattcgatttcaagccaagaaataactgcgcgtcctgcactgatttgaatgttcctagaaaccgtccatccttatacatttcaactggtttctttttcttatctgccacttccgcgatgcctttataataattttcgctccatgaaagccattgcatattgtcaaaaacataacctttcattgggttgattctatccactgacggttttgcgttttttgaataattatcaaattcccatatctcaaaaagtcttttaaattcatctgaattaagcgcccagagtttaaaatcatttaaagaaaatgttagacttccatagcctttggctgtacttctatcttttaatttttgatacagatttgttagcattccttttggagtgtgtctgtatttctcggtcgggttatcccacgctctaaacttaatctctcgcatgttaatcctcctatcgtgcagcactgctaaaactaacacgtgccgcaatcctaccttgtctgttaagcagcgattcacgcttaatcaataaccgattgccaactggctgtacatcaacgatttcagatggattattatcactttttagaaaatcgttgatttcttcggtcgttttgccctcaatgtcaactaagaaaaagttgtatagcgtttcattcatgcctatcactcctcctgactgctaacgcggtctttttattttgattaattcaaattcaactctcggaaacgaagccatgttagtcgctggcatcggttcgattactcggacaaccttatatttttcaccctcggtattttcgtgaatgcttccaacggggaatatactttttaactcgctcatacttttcatgtattcaacaatcattgctctacctcctttaatcaaataaactcatctgaccatcactcttaataaatggtcgtatttcgcgttcaaattcatcttctggcaactcataccaggttgtttcagattcatctaaataagttagtccatgattcttaacccgtttagattggtcgcgcacgaaagatgtatcatcactattgctgtaccagccgtaacgatcaccactcaagtagataaaccagcgtccatcagttacccggaataatgaatatttatagtcgtttatgcaaaatacacgattattatctatctccaattaacgcacctccatacatttgatttctaggctataaccgcccgttatgcgctaatggtcaaacgtttaatcaatctcatcaaacaaactaatgtcattaacgcaatcttctttaaaaatcggatataactcccatttctgcccgtccgctgttgtatactcgtcaatctgataatccccgtcatccgccttagatactggcaagccatcaagcgctactaggtgtgacttagaaagtaacccacgatgattctgttgccacagcttagcgctgaatctcaacacgctaatcacccagctttctaccgcaatcgcaatacttacattcagtcataagcatccacctccattacttaaccctcctgcttttctaatcgagtaaccttatagcctttgatctctcggccgttgtcaatatcgtattttaatttgtatgttgaaatgttaagaaactccgctgttttcttcgcactttcaaattcgatggactcgccatttttaatcaaacgatgtggaatgtcataataatgtgatctttgacgtgggattttaaaaccgtatagcttagcagcctcttgcaccgcgtcagctgaacggccaacagctttggcaacgtcttgctttgacatacctgactttaataattcaatcatcttcttgcgtctctccgcaactgtgctggttgatctctttttgaacagaatgccatattcggtttgaacattggagagtaacccagtatttatgcctaattcagtcatcacatcgttgcgcttataaccttgctcgattaactgtctaactttgaccgcgatgcgtgcatgataagcctttgtagtctcttcaagctgacgttgccaataatcaactgcataatacttattacgcagctcttcgaccgattcgggttttaaagcttgttccagcttgtcttttggaatgatcgtagttggttcattcacatcgttttgcaaacgccaattattcaactctgacttatgtggcgcttcatgcagaacttccttcgatttgacaccgactattacataattcatgctgtcacctcctagaatggtaaatcgtcatcattaatatcaatcgcttgcccgttatttgcgactgaatcagcaggcttgtgtgtctgattacttccggtttgtgtctgatttgcgttcgaattatcggatgctcttttttcaagcaaactaaaatcatctactacgacctcggtcacataaatgcgttggcctttctggttctcatagtttctcgtttgaagtcggccgtcaattccgactagtgaacccttgtgagtgaagtttgcgaagttttccgccgatttacgccagataacgcagttgataaagtccgcttcgcgatcaccattggcattggtgaactgacggttaacagctaagctaaacgagccaaccgctgcacctgacgacgtatatttaagttctgggtcttttgttaatcttcctattagaattactctgttaatcatttatattccccctaatatggcaagcagtagtctgaaatgactgcccgtctgtcttcttctggcatgttttcatatgcattactcaactctttattgacacggtaataaataatgtctaaaagcgtcttgtatcctgttgcaaaatcattccccgcaagttcgactgatttttctaagttgtcgtaaaataatttttgttcgtctgtaaaatcgctatgatccatgtacttctacctccactctcggtttgtctgaataatatttatgcgctgaaacgtctgttatttggttatcatcgagccatacgagcccatttaagccatctaagatgatcttgatgtaattatccgcgtcgggtttgactatcggtctaacgtcatttgaaagccgtctggcatactctttcttgctaactgatttctgaattgaccggtatacttttatgtcgacctcaatcgggcaagcgaatggcttatagtcgcttggtagctgctgtttggtttgttttttaatcatttttttataatcccgactctttttgggatcatacgctttggcaaagccaccgcggctactgaaccttgggcggccagccgctactggttcacccgtgattgttaacttcatagccttgtgcctttctgtagttaacgttgcattgtgggcacggcttaactgtcacgccgaagccttgtactatatgaataatctttctgtctttacataaatcgcacatttagaaaacaaccttccttttgtcgtctgtcgcattagtaaacttgataacaccgtcattcttgacgacgcctttatacatacgacttagtagttttggattgtaaatcttcgtcagttcttcactagttaaattagtcgtgatgattgtacggttacgcttgttcaagatgccaaacaagacttgctgcacccactcgctcgcctcttgatggttgctttggaatgaagcttcactgcctaggtcatctaacaccagcaagctgacaccacccaacagcttaaccatgcgttgttcagtgaatgggctgttcttgttgctaaatgagtccttaatcaatcgcatcaactcattaaccgagacgaacaaacacgcagcgtctggcttaatatgctcattaactgcttttagcatcgaaacagctaagtgagacttgccgacgccgggcacgcccgtaatgattgtgttcgctttatatccacggtctaaatactgacccgcaatatgtcgcgccttgtttaagttggcctctgcttcactgcctgaatcgactgtgtaattagcaaacgtcgccggttttaagtcgtcatcatcgaagattgagtcacattgtagtacgccgtgaaacgccctccggtaactctgccacgcaccttgcatcacaatagccgtatcgcgctcgtatttgctttgtcgaacgcacatggggcagaatggctcgtgtccttctaattgcatcatgtggcaatctgggtgagtctcgcagtacgttggcaacgtcttgacctttttaagcaggctaaagctgttgcctaaactagaattcaactccaccatatgagccccctttctgtttaattgcattagtttggtttaaatactgatcaaacttgcttccaaacaacgtgctaggctgcagaaatttcccatcgaaatatgatttagaatcattggcatcaatcactttgttgtcaataactttcttgaaatcatcgagttggtaaccttcatgccatcttgcttttattaactttttgttggactcaacgtttctaaaagttctacccgttttttcatttagatagccaatgatttttttataagggatagggtcgggtttgcccgacaatggttttatattatttgtattattaactgtagtattaaaagatgtattattaactgttaggttttccttgctaggggtagccagtttttcctgactagggtagctagtaattcctatatacctagcttggatttccttgctaccctccttataaataacttgccgattaatatatccgcagtcctcaagcgatttaagccatgcttgaattgtgaatcggctaacttcatagagcttcataaagtaattgttgcttgcccagcaatagcctttttggttgctaagtgccgtaatttcgccgtaaagcaacttagaaccttgaatcaatcgcttatcgtatcgcacattagctgggattattgcgtagtaattcggctcttccttatgatccatttgagccctccttatcttcgtagtcgcctctgacttttaatattcttagtgtttctaaatccggtttaaccggcttgatgtgataataattaataaacgagttaattcctttattatgctgctcggtatgatggttaacacaaagcggcataacgaatcgtttagtatggtcaaccttattccgattaacacccatgccgacagcgttaacgtgcgcaaactgtgctcgtttaccgcagataacacacttgcgatgctttaaacattgcagcgttaaatgataatctgtcgggatcatgtcccatgtctttgttctaaacggtatatcttgttcgaaacagaaatctaagataaatgttaagtagctggttgctagcgacatgctgcagttgcttaagctgaaccactcaatacctttatgctggataaactgatatttaaaccatgcttccattgcatcatctggataacctaagtagtcacagacgtcatgaatcagcgcgtacgtctttttacgttggtcaggactaatacgtctaccgtcttcaatttcaacgctgacggacacctgacgaccattggcgtacttgctaatcttgccaatgtttaaatcttcgtcgacttcgacttctagtttccgttttgaatatttaccaagctttccgtaaacagtcatggttacttagcttctttttcattctttttctcgtaagcattaatccacttgtttagctggttcatcacattgccatagtcgtaggcagttaaatcttcaaggccttttttagggttgatactgttgttaatttttgcttgttcccagaaggcatcgcggctctgtatacctttcgaaacttcaaccactttatcaagcgcgatattcattgcttcaatttgtgtttcttcaactggcacacgtctcaataattccttttggaaaatgtcgggatcagtatcgttagtagcaatgtggaagtattttaaaaagaacgtcttttccgcatacgtttgtgcttgccccattgcaaagctcatatttctatcatttgccatcgcttcgaaaggtatatcaatatgatcatttgggttatcaacatcaacccaacgcataataatcttttgagtaacgtgaaattcaaattgttctttgcctttcaaactcgtttcaactttttcccgtgctgtgtgggtcttaacaactaacgggtcaagcattacgccacgcttatccatcaatgggcgaattgccgatactactgaatcactgctagtgattgaatatttaacaccagacacattacttttttgaagttgcatgatttccttttgaatttgataaagttttctgcgtaaagtcataatcttttcaaccatggttaaacctccgtgggattgaataaatctaaaatgtcgcgtgcagtataatcacagtcagccattaacaaatcttgaagctcatagcttcttaataagtcttttaacgctgattgagcgccttgttcagtgtccttatactgaatacgctgatagccgccagttgctagtttgataaagaaatatttgttgactggttctttattgattggttcatctggttcaggtgcatgccattcagcttgccttaaacgttcagtatttccgtccataattaatacctcatttctattttttatgtctcgtggtacaatgaggttaatttagttctccaaaactaattaacctggtcgtcagtgtcgtcagcactgtcggcttttttttgtgccaaaaaattctttatgattgactccgatataagtcgccattgagctaaagacagctattgtcacgacgaattgcatgattttagggatatatagtcctaatagaatgctcatcgcaactgccatgtacatatgtttattcatgatctctctccttttgttgttggatgtatagcttgtgcttgtatccttcataccagcggtcagctagttgtttgtatgcgtcccagttcatctagaaacctcctttattcacggaacaagtccatcgcctcatcaatatcagccactttatagcggatagtgccatcaatgacatagcgaccaagtccgttttgttcgagtttttcgagtaacgctttcgaaccggcgtacttttgtgcttttgtttgattaaggtaaccgctgattgttggtttatcctgtgtttctcgaggcttaagggctattgacttagcaagttcttcaaccttctgccagacttgttctgctagctcttgcgatgcttcatcgcttagtattgccgccatggttaaccctccttctctcttaattcgtccaaacttacgccaagcgcatctgcaaatttgcacataaggtcaaagctaggctttttaatacgacctttttttaactcagttaatattccgggactgacttgcatttttttagcaagttgtctttgatttatgttgtttaatttcatgatactttcaatttgcttccacatttttgcctcctgatactacatgttgtatataacgtttgatttcgtacttcatactgtatataatattaagtgaatagtgacacaatccagttgcgctatttaatttaaaaattttggagttgattattatgagcaaacccttcatgctaacgtatgaccttaatagtcctggtcagcgctacactgaaattaaagaaattatcgaaagtgaactctctagcggtgaatggtgtcacttttgggattcgacttatttactgcgaagtaacctttccgcttctgaaatgatggataaactaaaagcaaaagcagattccggcgataaattttttataactgaaattgtaaaaaacgaatattctggttggctaacggaagatcaatggaaatatattaaagagcacattgtctattgatgctttgcttcatattccgcaagggtcattccttttacagattcgctctgattagcatttatcgttaaatatctcatcaacgattgattagtttccgacaacttttcaatcgttttttgttgtgattcgataattgcttcatagaattctttatccatgtttaagcctcctatgccgtttgttgttgttcaatagttggtaatacaccgttcagtttaagcagttcatacaaacctagccggcccttttgcgtccatttagtgttgagaactgctttttctgtaccgtcttttcttcgaaccatctgtgtttcggattgagtccaaccattgcgttgatatttggcatataatagccatgttttaccttgcttgtattggactttcaaatcatgtagcagcatattcatcttggtgcctgacataccataatcttttgcgataactgtaattgacacgagcgcttcattagccaataccgtatcgtaatacgttgctttaggtgttagctcattaacacgttgttcagcaatcaaacgcccttgacgttcatttttgacttgttgtgccaaatttatgatcgtatctggatttaataagatttcttccgctttttccacggttagatatgcgccgttttttcgaatagatggtagaacttcttttgtcacccatcgtttgaattctttagcagccggtagcttactggagagaatcaagctgtatagacctgattcattgataatgtacatgttgcgcctttgacctgatgcactaatatggtgcgttagcttatcttctgtatcgacccgatttctaatcgcgttgtctgaacgctcataacctagaatatctgctacgtctttaccgacaaaatatggttcgttctcaattaacactgttcgaacttgattgccgttgaaattgaatagttgtaaatctttcattctcgcacctcctcgtttaaataaattgttcccgttcgggaacatttagagcaaaaaaaatctgaatatctgaatagtgtcctagtatttcagcaacctttgcaagttcgtcagcaccgaacggaacgttcccgttttctcttttgatataagaagaacggttcattccgattttgtttgcaacttgttcttgcgtaaacccttttgcgacacgttctgctttaattctttttaagttgattgacatgcccatcacctcgctttcaaaaactatcttatcgcggttgttcccgattgtcaactaagttaatctaaaaagttaaaaagtttctcttttgggaacattaactattgttcccatttggaacatatggtatattatagacatggaaggaggttgtaaaaatgagaagtaatgatggaattatgaacattcttattgaagctagaaagcgtaaaggcatttcaattaatgagcttgcttctttaacaggcgttgcgaagtcttctatttctcgttacgaaaacagaagtagacaattcccgttagaccaaatagacacattttcaaaggctctcgggttagaccctaaggaagttctcggcttcaacgatgattcaaatatttctttggtaaagtcaatcattcgaattcctattattggcgagattgcctgtggcgatccaatcaccgcacaagaaaatatttcgggttatgtagaagaatccactgagaacctcccttcgggggaactgttctatcttaaggcgaaaggcagctcaatggagccgacagtcccaaatggttctaacgtcttaataagagagcaaccagaagtagaagacggtgaaatagccgcggtgcttgtaaatggtgacaccgaagcgactttaaaacgcgtaaagcaccaaggtaatattattatactgattcccgataatcaggaatacaatccgtacatcatcaccgccgacaaccctgctaaaattttgggcaaggcaattaggtttacaacagatttataattatcattgagctcggtcaagccgtcccataggtgcaagtcctatcgctcaaattgaaacaaaaaagcctcaatgaatcgtggggattcaataaggctgcattgatgatatatgcaaatacattttaacacattgggaggcttaaaatgatcgacttacttgttttgattctattgtcttctgtcgtctgtatttggttttttatcaaaaaaaggccaaataaaacattcagaaatttagctattcttacttcggcaatttcttttatagccattggtgtattagctcctaataagcaaaaaatccctgcaaaagaagtggcaagttccgaaaaaagcatcgctaaaaaagcgccttctataaatatcaaatctaacttcattgctaatggggctggggcggtaacaataagcggtatcgttatacctaacaaatatgtaaaaattggagctgactctgcaaaagctgatgataacggtaatttcaaactgcaatacgttttaccgaactcggaaactactacagttaagattcgtatagttaacgatgaatacgatacgaaagcattagcgactaaagatataaaaatcaaatctgcatacgattcaattaggttaggcatgactaaagatgaaataacaaaaatactaggtacaccaacagtagataaccaaaatgtcatatattatggaacacagtcgctttcatttattgataatagactggtttctggaactcccaatcaactagcttctcaaatcagtaactctgcttctgaatcaaatgagaataaaacaaaaaaagaacctactgagcagcaaaagcaacaagcccaacaagaacatgttagaagtttcgcccgcacttttggaaataaaccagcccaagaaattcaagaaaaaagctacgcttattcatcacgaaatgtcgccggcttaggtatggtttatatgtggaaagttgacaaggacattttaatgcgcatagatggatcagataatatcacttctgtttacttgtatgataaaatgctgaaaatggtaaaggtcagttgctataccaaggacatacaattattaataaacaaaagaaacaatataacttttataattaatctcatctattctttaccgtccaaaagctgaagacgataaaagctgacttaaattattttggaggaatctcaaaaatgaaaaaaatcattatctcattattaacagtgctatctgctctatttattctaaccgcttgcggcaataagaaagccgactatacagaaaaggcagcagaatctgctctaaattcaggcaaaaatattgaaggaaaaaccgttaagttcaaagtagatcaaatagatccaaacagttcttttgggtataaccttcaaacaggcaaacacttgaattttgttgattcaaaaaatccaaatgttaaaaaaggcgatacagtaacagttaaagtgaaaaaagtgacttcaactctcggatcatggattatttcctatactgatttaaaaaaataacggataaatgttcgaccatcagttaagctggcaatgagtgcaaggctcattggtcgaattggacctttaactcagttggttagagcagacggctcataaccgtccggtcgtaggttcgagtcctacaaggtccattgcaacaaaaaagacacacctctctcccgccaagaagtaaggtgtgtctagcaaaaaaggtacgcattagcgcacgctatttgtgtaccctattttaccataaataggagtgatttataatgtttgaatataaaaagaaccccgcaattagagaatatgagaccaaaaaagacgtcaaaaagtatatgttccaaatctatacagggattaatccagcgactaacaagaaaacgacaactacccgccgtggtttcaaaacacctgccctggccaacgcggcatatcgcaagattgaagccgaagtgatgaataaaaaatatgagttcaacaataaacctgaatccgataacttcacattcaatgatgtttaccggcgttggtttactgactcgtatcgtaagacggttcaatcaagtacagtctataagacaaagcaaatctttgattgtcatattctgccggaaatcggcacaatgaatatggatgctattacaccagagatcttgcagccaatcgttaaccggtgggcaaccaagtacgctaagttgaacatcgtgagtcgttatgccaatcgtgtgtttaaatacgcctacacgatcaagctgattaaaagcaacccgtttaatcacgtattattgccagcacgccaagttaataatacaaacaaaacacccagcacgaacttctttagtgctgacgaattggacaagtttactcgctttctggtcaaaggtcgtgccaatggcacggtgagcatgatgcacgccgtgtacttcatcacgatggcttacacgggattgcgtaaaggtgagttattggcgcttgagtggtctgacattgatctagaggacaataagcttgatgtaaataagaccttagccatgaatgagtttggcaagctggcaacccagccgcctaagtggttatcttatcgaacaatagacattaacaaccttgtagctaatacgttgcaagaatacaaggaatttagccactctaatctcgtcttcccaagtgaaaaagacacctggttgaaccttggcaagcctaacaactggttagacagcattatagatcaaggtgccgaaacgtttaaaaccgctttccaactgactggtgatgactactataaaacgtttgtgcatcgtattaccccgcatggtttacgccatacgcacgccacatggctgtttgagaaagataatacgattacacctaaagcggttcaagagcgcttaggccacaagaatattagtgtgacaatggacatttatactcatgtcacatcaaaccaaaaggacaaactaaagtctgcgttagacgtcgattattgagggttagtcaaaaagttagtcaaaaaaggcagcttatccgttggggctgtaaggattagcgaaaattaacttaaaaacaccatttctagcacacctcaaatcaaaattgactaacctttttgactaacctttgatagcaaatataggcaaatatagtaaattcaagagaataagaaaatagcctaatcactgatttaacagcaattaggctactatcggataatataagatattcaagtaaggagagtacaggatttgaacctgcgcgccggtataagccggttcgacggatttcgagtccgttgcattaccactctgccaactctccagaacgttattcattataacagacttctaaagaactgaacagcgtaaaacgcaaaaaaacctacgtgcgcccacattctattcgatcaccaccatcccatcttgatcaaattgccagtcctttgagtaagcgacttcccaatagtaaccatcgggattactgaaataaccactatagccaccccactcgccccattctggcgctttgatgagcgtggccccgttagcgagagctgttttaaatgttgcatcgacttccgcttgactatgcgtattaaaggcatgggtcacgccgttgaacgttcttggaaatggatgattatctgcggataagccaatatcggctagtagtgcagtgtacggaaacaattccaacttggtcccagtattattgaaaaagacgattgtctcagcattttctaaattcggcgcttgaaagccgagtgcttggtaaaactgccgtgacacggttaaatcctgaacacctaaacaaattaaatggatactattcatcaaatcacctactcgttttaaattaacctgattgtatcaatccgaagctaataacgcaattctccctgttaattggccaattattaaatttattgaatcatatttctttttataaaaaaattcgttatacttaaagaatcttaaatgatagaggtttattaatatgaagatttcttatcgcaaactaccgtttttattcaacttaattttcttagttgtaacggttttacaatctttaatcattctagtggttaacccccacgttacgaaattcatccccacttatatggatgccatggcgaaagtatggtggttgtgcattattgctattattttgcatattgttgcttatttattatcactcgatcagaatttgattttactggcatacttatgtgcaatcgtcgcttacatcatcttgattttagtccctaatttattactagttgcccttttcttgttggtggttagcttgatcatttcatttaaagtctatcatttccattatcgaacacctgcttagtcctcgtcggagggctatttttttatgcgctaacccatttaatttatggtataattagtttgaaattaagacaaaagaggttctagtaatgaaacgactaactgcgattctatctttattggtactttgtttactgccttttgtaagcccttacttcttcggcaaaggcatgcgcttttctagtaatcatcaaaaaaatccaatccgctttgaagtttgtcggcatccaaaggtccaccacgcagtcgatcgtgatggcagtgaacaaaaattaaacgccttcaaccaccgctgcgaacggttctttaatcaactcacacttgcgcctgaagcattctacgccgtagctggatttcttggatttaccgtctttattctattattagaaccactacttgcactcctaatgaccctcaagaaagtgccacaacccaaaaaggcacaatcccatactccgcagaagcatcagattgcgccttataagtggcatttattagattagtttaagttcaacttttgataagtataatggccctcttttagtgattgattcgcatatggcgtctcattgagcaacgccacatattcttgggcccgttgttccgaactaaacgcccggatcattttacttttatcataataaagtgggtttgcttgatataaaacaacgtagatccattgattcatctgtcatcacctaactttgtaatccacataaagaaagaccaactcgtaatgagtcggccttttttaatgtcatcttaacgacgagcttctttgatacgagctgccttaccacgtaatgcgcgtaagtagtataacttagcacgacgtacacggccatgacgagtaacttcgatttgagcaacacgtggtgagtgtaatgggaaagttctttccacacccacaccgctactgattttacgaactgtgtaagtttcactcacgccaacaccatgacgtttgataacaacaccttcgaataattggatacgttcgcgagtaccttcgacaacacgcacgtgaacacgtacgttgtccccaggacggaagtcaggaatatctgaacgtagttgagacttagtaatttcttgaattaatggattcattttgaatctctcctttttccacagatattcattaacgtcttgcgccagcggaatatcgttgttttgtgactaatcatcacaatttttaattttagcataattcaactgagaataaaagccttatttttcagccgcttcttgcttaatttcttgtaaccagtgcaactgatccttggtcaacgtcatcttctctagtaagtctggacgccgttcatatgtccgtttcaaggacatcttctcgcgccactcgttaatgagcttatgattcccgttcatcaagacttcaggtacctttaaaccgcggtattctggtggtcgcgtatattgtggatgttccaataagccggtcgaaaaagaatccgtaaccgctgattgttcattccccaagacgccaggtacaagccgcgaaatggcatcaatcatcaccattgcgcccaattcgcctccagtgacgacgaaatcgcccaatgagacttcatcagtgactagcgtgcgaatccgttcatcatagccctcgtaatgcccacagataaaaaccaagtggtcttcttgagcaaattcttcggcaactttttggttaaacgttaccccagctggatcgagcaaaataacccgtttgtgccccggattcttggcattcacttgatccatcgcctcaaaaatcggttgtggtcggagcaacatccccgcacctccaccatacggcgcatcatcaaccgaattgtgtttattgactgaaaaatcacggaaatccgtcacttctaaatcaattaagtcacgatcaattgccttaccgataattgattgggataacccattttgaaccatatctggaaataaacttaagacatcaatcttcattatcaatcaatccttctggtacttcaacgtaggctttacccgcttcaatatcaattttcttaacgactgacttcaaaaatggtaagagtaagtctgaacggccgcggcgcttgatcacccagacatcgttgggacctggatcgatgatttctgagactttcccatagctggtcccatcggcttcttcaaccacttctaagccgataatatcaccgtagtaaaactcatcatcttccagatcatcttcgcgttgacttgcagcaatctttaaattatggcccttgaactgttcaacatcgttgatattgcccattccttcgaactgtaatagatagaattgcttgtgttggcgcattgccgccactttaacatcaacaaggccattgggcatttcgacggccagttgcacgccttttttaaatcgtgaatccgtaaagtcagtcgtcgcaatgacccgcacttcaccacggatgccgtgggtattgacaattttaccaacttgatagtatttttctggcatttaatttctccttaatcgacaaaaaacgcctaaataaaacatctctgcttcatttaaacgtttttgttaggcatctacaatatttaaacggacccgtttttggtatggtgctttcacactatagacaatggtacggatggactgtgcaacccgtccctgcttgccaatgacgcgaccgatatcacttggattaacctgtaagtcaaattccataaaacgttctgtctcatgttcagtcaatttgacgtcttccggatgttcgacaagtggctgaacaattgcaataattagttccttcacgtctgtcataacgaatccctactttttagcgaagcgtgcttcgtgatatttttgcataatcccttgttttgataaaagattacgaacagtatcagaaggttgtgcgcctttttgtaaccaatccatgataacttcttcttctaacttcaagtcaactggttctgttaatggattgtagtaacctacttgttggataaagcgaccatcacgtggtgaacgtgaatctgcaacaacgatacggtagaatgggcgtttctttgaacccatacgtttcatacgaattttaactgacattaatgccacctcctattaattctttaacatgtcataatataccaaatttcaaacgccgtgtaaagtgttttttctttacaggacaaatttttttaagatttaaaacgacgcgcgtttttgagacgtttcttcttgtttttcttttgttttttcatcattgaattcatggccatcttacccattttacccttgataccgttgcccattaaaccttccatgccgttaaagttgccctttgacatttggttcatcatctttttcgattgattgaattgtttgatcatccggttaacttcaacgattgggcgaccagcaccagccgctaaacgacgacggcgactaggattcaataagtcaggattttcccgttcttgtggcgtcattgattgaacgatggccttcatatgcgccatgtctttcggatccatcttgatgttcttgagttgtgggttattggccatccctggaatcatcttcatgatatcttccaaaggtcccatgctctgcaattgatccatctgatccaagaaatcgttaaaatcaaagctattttctttgatcttttcagccatatcagctgctttttgctcgtcataatcttgttgcgctttttcaatcaagctcaacatgtcacccatcccaaggattcggctactcatccgatctggatagaaaatgtcgagttgatcaagtttttcaccttgaccagtgaacttaattggtttgccggtgactgcacgaattgagagggctgccccaccacgtgtgtcgccatctaacttggttaaaacgaccccggtgacatctaaacgactgttaaagccttcagcaacatcgacagcggcttgcccagtcatggcatcgaccgttaagaggatttcatttggatgggctagctcattaatatcagccaattcttgcatcaaggcttcgtcaatttgtaaacgaccagccgtatcaattaagacgtaatcgttcttttgtaaggccgcttgtgctaacccttgacggacgatttcaactgggttgacatccgtccccatttcaaagacttgtgcgtcaacttgcttgccgacggtcttcaattgttcaatcgcagctggccgataaacatcggcggcaatcatcaatggccgtgctttttcgttttggattaaatattttgctaatttcccggccgtggttgttttcccggccccttgtaacccaaccatcataatgattgttggaatatgtggtgatttattcaacggcacagccgtttcacccatcatcttcgttaattcttcatcaacgatttttacaatttgttgtgcaggtgataagctatcaaggacttctgccccaatggcgcgttccttgacgactttaataaagtctttaaccactttaaagttaacgtcggcttctaataatgccagccgaatttcgcgcatcgcttgattgacgtctgtttcggtaatcttccctttacgccgaagcttactcaatgcgccttgtagtcgttctgttagcccttcaaatgccattttttatcagtcctttaagttaattattgttcggttaaattcagtaagtcagccaacaagcgcatcagttcttgatcgtctggatagtgcgcttgaatatacttttgtagcgtatctgcactggcattttgctgttcataattacgatagagatgcagcttttcttcgtaaccctctaagattttttcagtccggcgaatgttgtcatagaccgcttgccgactaaccttgtattcagcagcaatttcgccgagagaaaaatcatccccataatataatgagatataactatgttgttttgccgttaaaagtgcgccataaaattcgaacaacgaattcatgcgtgcgttttgtgcgagttccatttgacgcctcctagacttagtttgacctaactattagagtaccgattttaacgggcttagtcaacgttttattgcgcgatttaactagaagtttgtgcattaattatcttttcactggtataaacgaaaaatcatgctaaaatagaactgtaagctttttcataacttaaattggaatttctatggaggttgtatgatggcagcaacaattatctattggggcgttatattcgcattaatcggttggggactctggaacttaatcttctcagtcgtctatttaaagaacaaggaaaatggtaatctttggttcttcgccattttaaacatcttaaccttattattcgggctattattctggtgggtcttcaacaatcacgcttggcaagaatactggttggttaaagcaaccgcaaccaacagtctactaggtggcgttttaatcgcctatgtcgtcttaattatcgcccaagtgattttgggacgcgaaccaaaagccaaaacagcttaatgctaaaaaagaggatcgacacgtttgtcggtcctcttttctaatgttgtttagcgattaatcgcgcgatattttcactgacttgcgttaaattaacttcagtagcttcaattgcttttgctaatgacattgcgccaggtgttgtgcagaaaatactgtcaattcctaattcataaagcacatcaatccccgctccaatatatccggcaatcgcaatcaccgtcgcctgtggattaacttgtttaaccgctttggcgactccaattggcgtcttaccatattgtgtctgaaaatcgattccgccctccccagtgacgacgatatccgcatctcggacaatctcagttaacccagtttgcgccacgaccatctcaacaccaggttgaacctgcgcatccgtaaacgccaataaaccagcccctaagccaccagcagcacccgcacctggtatttgcgcaacagatttccctaaatcacgttcaatcaccgcagcaaagtgcgttaaattccgatcaagttgcgcgaccattgctggggttgctcctttttgtggaccaaacacggctgatgcgccattcgggccgaaaagcggatttgtgacatctgatgcaatcacaaccttaacccttgatagtgccggtatcatatgcgtcgtatctatccgtgctaaacgcgcaagcgccccaccgcccagtggtaacacctgtccgtcaacgtctaacaaacgcaccccaagtgcttgtgccattccagcaccgccatcattggtcgcactgccgcccaaaccaatcacaattgtttgcacaccttgtgctagtgcggctgccatcaactgaccggtgccataagtcgttgttatcaacggattttgcgtttgcgcatcaatatactgaatcccactagcggctgccatctcgatcaccgccgttttgccatcacccaagatgccatattgtgctgataccgtttggtccaatggattttgcacttgtgcggttaagaaccggccattggtcgcatcgacaagcgcttgggcagtcccttcgccgccatctgccattggcacttcgacataggacgcgcttggtaggcttttttcgaatcctttccgcattgcacgagccgcttcttttgcggtaacagcatttttaaatgaatctggtgctaacacaattttcatctgttaatctctctttcttctaaaaaaggctagaacaaattatttgtcctagcctttttgctatttaatcgcttgactgacgtctgtatcagttgttttttgtggcccatcaccgacaataatgtccttgaataagccataaacaaagcggtttggatcaaagagttgtaagtcgttcatttgttcacctagaccaaccatcttcactggtaagtgtaattctgtgcgaacggctaaaacaatcccacccttggccgaaccatctagcttggttaagacaatcccagtcacatcggttgtttgcttgaattgtttagcttggactaaagcattttgtccggttgttgcatctaagaccaacaatacttcttgcggtgcagctggtacttcacgcgtgatgatgcgtttcactttttccaattccttcatcaagttgacgttgttttgcaaacgaccggccgtatcaactaataaaatatcgaattgttcttctttagcgcgcttaaccgcgtcatagacaactgacgctggatcactccctgctgcactagcaaccacggggacattatcccggcgaccccattcttgtaattgttcgatggcgcccgctctaaaggtatcaccagccgctaataagaccttcttacccgctttttctaattggtgggcaaacttcccgattgaggttgttttccctgcaccattgacaccaacgaataagaagacagttaattcgccttgtggagcgaaatgcaattgactatcttctgcttggccttcttgaccgtacaaatcaactagcttttcaacaatcgcttgtgaaaccgcttctggtttcttaacgttacgcaacttcacttcgtcacgtaattcgtcagcaatcttcatcgctgtttcgtagccaacatcggcttcaattaacatttcttcaacatcatcgaaaaaggcttcatcaacacttctaaagttagcgaacaacgcatttaagcgttgcccaaatgtgagccgggatttttctaatccatcatcatacttcttcgtttcagcagcttgcatgtcgccagttactgcttctgtttccggcacttcttcaatcgcatcggattcttcagttactgccgacgcttcaactggttctggttctgagtttacgggtgccgccgttggtgtgtcaagcggtgataccgtttctgaatcatcttcagttgctaaactggctggttcatcggtttcagttttctcagctgccgcagtttctgcaggggtttgcgattcaaccggcgtagcgtctgattcaaccggtgtttccggtatcgcttggtcttgttcaaccggtgtttctttttctggttcggctgagaatgcttttttaatacgatcaaataatcccatggttttcctcctaggctgttgcgtgttcttctaatgaaacggaaacaatcttcgagattccagattccgccattgtcaccccgtataagcgattggcttgggtcatcgtcccttttcgatgggtaatcacaatgaattgtgtgtcactttcgtaacgtttcatgaaacgaccgaaacgatcaacgttggcttcgtccaacgaagcttcgacttcgtccaagatacaaaacggcactgggcgtacttttaagatggcaaacaataacgtaatcgccgtcaatgcgcgttcaccaccagataaaagactcaagcgttgtagtttcttaccaggtggttgcgcaacaatgtcaatcccactcgttaatagtgcacttggatccgtcaacgttaagctggcatggccgccaccaaacatgatcgggaagatggtttcaaaagcagcggcagtttgttcaaatgtttccttaaaccgcttttcaacttccgtatccatttcagccatcgatgctaataattggcgcttagcgtccatcaagtcggcatcttgttgcatcaagaaatcgtaacgttctttaacgcgttgataatcatcaatggccgccaagttgaccgttcctaaatcagctaagccgagtttcaataatttcaacttagaccgcaattgatcgtcggttaagtctgatgcggccaaagcggccttggcggcttcgtaagtcaattggtaatcttcgctcaatgtatttaagcgttgatcaatgttaattttaacccggttgagcccgacagcattttgttcttgctcagctaaactatttttttgtaattggtagacgcgtgtggccttggcttgaagcgtttgttgttccgccttcagcgtttctttttgcgcgcgttcagtggctaacttcgcttggactttctcaatcaaagcattggttgcctttagcagtgctcgtcgttctttttgactcgaagcgtcttcttgatccgcttgttttagcgcagctagtttatcctgactggccttcaactgggctgccaggtcgttgctattgcgagtagcaaccgttaatttctcctgaacattcttttgttcagcttgagcgacagccaacttggtttcgagggctgtttgttgttgcgcaatttgtttttgactctcatcaaaatgttgtaattgctcattagctgtttcgagatctgcttgcagctgtgcaatcgacgcaacaatttcagcttcggctgccactaattctgcctggcgttttaaatctgcctcataagcttgttgttgttgttgcacttgataatcggttgcttgttgttgccgttcaaactgactcaaacgttcgtcagtcaaggctaacgtattttgggcagcttgatattgattcttagcggtttccaatgccgcttgtttcgtatttaattctgcttggcgtgccgttaattgagcttttgcggcttggacactggcttgcttttgatccaaagcgacctgcatcttggcaatttgaccttctaaatcagtcaaggtttgctgacgcgcaagtagcccaccattgttttgtcggttattatggcccccagtcatcgaaccacccgggcttaaaatatcccctgctaacgtaatgattcggtaacgatgccccgtcaattgactcaatttaatcgccggctccaactcagtcgcgacaatcaaattgcccatcaaatggttcatcaccggtcgcacttgttcatcaaactgcacaagctcactggcaattccgataaatccaggctgctgttgtaattggtgaactaagctacttggtagtaaacgtggtttgacaacgttattgggtaagaaagttgcccgcccaattcgattggttttcaaatactcaatcgcttgtttggccgtctgttcatcccgtgtcacaacttgttgtagctgtgcgcctaatgctaattcaatcgcttgttgatactcactgggcacttgcatcaattccgctacagcccctaataaaccagggaactgttgtttttgcttcaagacagccttaaccccttgataaaagccggcgtagtcatcatttaattccgcaagactggcttgttttgctttcgctttttgtaaaataccagacgcttggaaccaactattttgttgattttggtaagccgcttggtccgtgttaatttgcgtttgtaattcggccaactcattggacaacgtttcgtattgcgctttgagtgtttcaagttgggctttttgggccgcttgttctgcctttttttgtgccaattgcgtcgatgtctcatcgactgcactatcttgccgtgcaagttgcgttttagtttgtaacaagttcttttctaaatattgttgttcattatgattggtcgtttgggcttgcatctgatcgatgtattcttgacgaatttgttcaatcttcgctttcagttccgcttcactaccagacgcttggcgtttaagggtggttaactccgtcttcaacgcccttaatgccgtcaccttttcttcataacttgcctttaattcagattgattggcttgttccgccgttaattgctgttttaatgtgtcgatctgttcgactaaactttggcggttcgcatccgtataattagcgcgctcttttgaaacgttctcttggcctaatagattttcagccaagcgagacttttctaacaacgtctgattatcttgttctatttgttgttccaactgggctaaggttgcctgattctcggtttgggcagccgtcgtcttagcgatgtccgcttcaatctcttgcaacgcttgcgcaagggtttgcgccttttctttgtacgtcttttgatcagccactaattgatcaatttcaatcaccaataattgttggtgcaacgcatcatattgcgctttttgatccaagtaatcctgcgcaatactgttttgttccttcaacggttcaacttgtccccgtagttcatgaagaatgtcggtgacccgactcaaattttcatctgtttgatctaattcagattgagcctttttcttttgttgtttatatttcaaaacaccggccgcttcttcaataatattccgccgatcttctggtttactgttgaaaattgcttcaacccgaccttgcgaaataatcgaaaaagattctcgcccaaggccagaatccataaataaattaacgatgtcttttaaccgacaactcttttgattcaaataaaactcactatcgccatttctaaataaacgccgcgtaatcgtgacgttggcttgttcttgtttcaaatattgatcgctgttatcaaaagccagcgtcacttctgccttattcatctgtggtcgaatatcagtcccggcaaaaatgatgtcgggcatcttttcgccccgtaagctcttggctgattgttcgcccatcgcccaccgaattgcttctgtgacgttacttttaccgctcccgtttggtccaacgatgcccgttaaaccttctgaaaaattgatttctgttttatcagcaaatgatttaaaccctgataaaaccaatgactttaactgcatgcactaaactccctacacacggcggttggtttcaactgtcgtttgcttctttctttatttcagtttggcaagcgccactttagcagctgcttgttcagctgcttttttgttccggccaacacctgaacctaagacgcgatcgcccatcatcacatccacttcaaattgacgggcatgtgatggtcccacttctgccaataacttatattcaatctcaacttcaccatcttgttgcaagaactcttgcagattggtcttataatccgtttggtctgaaaattcaccggcttcaatcttgggaaagacaacttgttcgatgaatttaacaactgcgccacgcccttgatctaagaacaaagcgccgttaaaagcttcaaataaatcttccaaaagtgttgctcgtgcccgcgcaccgtttttttcttcccctttaccaaggcgaatgtatcgatcaaagtgcgcttctttggcaaaactactgaaactcttcgtgcagacgattgccgcccgtaagcgtgtcagtttgccttccggccagtccggatattttttatataagtattctgaaaccgtaatttccatcaccgcgtcacccaagaattcgagtcgttcgttatcacgaagacccaactcccggtgttcattgacgtatgacgaatgtgtaaaggcttcgtccaatagtgctaaattctgaaattcaatgccgtagcgggctcgaagctcgctcactagtgctgcatccaaaattaaattaccccatttcaactgtttaatctttcactattataccgtttatacgcttaaaaaaacagcgtcgttcctagcaaaccgtttcttttattaatcactaaaaaacgcctgttttgaagtattcattgtaacacgcaaacgaatatttcaaaacaggcgttgctttatgcagatggcgttgtcattgctgctaaagcggtttgataactcgctagttcagcttcagttgcatagacatagtgttcatcggccacttcgcgcaattgacgaccttcattatctgcctcaattgaactatcataagcaattcgccgacgttgccgctcgacctttggatcaggtaacggcacagcagacaatagactttgcgtatatggatgcaatggtcgatcataaatgtcatcggctgatgccaattccataattttaccgttatgcatcaccgcaatccgatcactaatgtatttcaccatcgataaatcatgtgcgatgaataaatacgtcaagttttgctgttcttgaatttctttcatcaagttaaccacttgtgcttgaatcgatacgtcaagcgccgaaatcggttcatccgcaatgataaatttaggttttaccgcaagcgcgcgggcaatcccaatacgttggcgttgcccaccggagaattcatatggataacgcgttgcatggtctttattcaaaccaactaattccaaaagctcgttgacgcgtgcatcacattctgcatcatttttaaccaaatgatggatatgcaagccctcagcgatgatatctttgactttcatccgtggattcaatgatgcgtagggatcttggaaaatcatctgaatctctttccggaacgccttcatttcacgactatgatttttaatcttactaatgtcacggccatcgaatagaatttcaccatctgtcgggttgtatagccggatgatactccgcccagttgtactcttcccagaaccagattcacccaccaagccaaacgtttcgccttcatagatttcaaatgagacatcatcaatggctttgacttcggatttttttccttggctaaaatattgctttaaatgtttaaccgacactaatacttttttatccttgtccatcaattgtccctactttctcttgaacttgtgtcgcctggtacttagccatcattgcacggacggctgctggtggttccacagctggtgcatctggatgcaacaaccaagttgccgcaaaatgcgttttcgacacttggaaaaatggcggttcctgttccacatcaatttgtaaagcatatggattacgcggtgcgaaggcatccccttttggtggatccaacaagtctggtggggtccctggaatggcttcaagacggccagaagtatcaagtgttggcattgagttcaataagccccacgtatatggatgcttgggttgataaaaaatttcatcaaccaacccatattcgataatcttaccggcatacattaccgctactcgatcggcaatccctgccacaacacctaaatcatgcgtaatgaaaataattgaggtttcaatcttgcgttgcaattccttcatcaaatcgataatttgtgcttgcactgtcacatcaagcgcggttgtcggttcgtcggcaatcaggatttgtggataatcaacaatcgcaatcgcaatcacgattcgttgccgttgcccaccagaaaattgatgcggataatctttcatccgtgctttggcattcggaatacccaccaactctaaaacactctgtgcacgtttcattgcttcttccttattcattgttttatgaatcaacaagggttcagcaacttgtttaccaatcggcatcgttggatccaatgacgtcatcggatcttggaaaatcatggaaatatcgctaccacgtaaggcattcatttcctgttctggtttttgtaagagatcttcattgtgatacttgattgtaccacccttaatttgagcattgcccgctaacaagcccataatactacggaccgttaccgacttacctgaacctgattcaccaacaatcgctagtgtttcgccttttttcaagttgaaactgacatcgcgaatagcatggacgttccctgcgtaggttttaaaatcgatacttaaatgtttaacttctaaaatatttgccatttgacgacctccaatgatgaaaccgcgtggaaacggccttgtattgacatgctttttgaaactgactctgcttctaaacgtgctttcattaactgctttctgtggttagctacgtctaataaataatcaacaagttgattattcgtcagactatgctaatccgcgaaagctaaccgcctacttgcacacgctatgattttggatcgaatgcgtctcttagtccgtctgctagtaagttgacggcaatcatgatcacacagaggactgctgctggataccacatttgatatggcaagaaacggaaagctttttgcccatctgataataacgtccctaatgaagcattcggtgctggaatcccaatcccgataaagctcaagaacgcttcgaagaaaatcgcactcggaattgtaaacatcgtttgaataataatcgttgaggataaattcggaatcaggtgtttccaagcaatcttggtggaactttcacccaacgtccgtgcggcgagcacgaattcttgttccttaagttggaacgtttgggcccgaatcaaccgggccattgtaatccaaccggtaaagccaatcgcgatgacgattgacaataaacctggacggagtaccaacatcatcaagacaaccacaattaagtttggaattgatgaaatgatttcagttacccgctgcatgaacatatccaaacggccaccacgccatccggaaacaatcccgtatggaatcccgattaataaatcgaccaatgtcgctagaatcccaattaataaggataagcgtgtcccgtataaaattcgtgataataaatcacgaccgagataatccgtccctaagataaacgttttgcctttgggaacgcccgcttgttgatatttatcaactttaacaccggaaacgtccatcttaccggtaaaaccagggatattccccgatccaattttaggcggtaagttagcgtacgccacattttgtgtatttggactttgtggtgcaatcactggtgccaataaagcagccaacatcacaattaagaggacaactaacgaaaccaccgcgactttattttgctttaagcgccgaatggcatcttgcgtaaacgtcaatgatggtgcactaattttttcttgtgcttcatgcgtgtcttgtgtaaggggcttgaatgagcccgctggtattttaatatctgccatttagtgcgccccctgactgtcacttaatcgaattcgtggatcaataatcccgtaaagaatatcgacgactagaataatcactgttaataagaatgaatagaaaatggtcaagcccatgatcgttggataatcattcgtcataattgacttcacaaattgctccccaattccgggaatcgagaaaatattttcaacaactagtgacccagtcatcaagttgactgccatcggcccgataatcgtaacaaccggaatcattgaatttcgtaaggcatgctttgccactgtttgccattttgaattgcctttggctttagcaagttcgatgtaatcactgtttaaaacatcgaccatttcagtccgcatgaaccgagccgtattcgccaatggtgcaaccgctagtgctaatgttggtaagacactagatgaccagccgtcccataacgcaattgggaatagttgtaatttaaaggcaaggaaaaattggagtaagaccgccaacacaaagttcggaattgaaatcccaacgattgaaaagaacgttgcaacgccatcgacccatgtattcttgcgaatggccgccactgcccctagtaaaatacccagtaatgagccgacaatcatcgcttgtgccccgatttgtaatgaaggtcctaaacgcgtcatgattaggctcaagacgggctgattgttgaactggaaggatgtgccaaaatcaccatgcaacaagccacctagatagatgaaatattgctgaattaatggtttgttcaaaccgtactgttcattcatgatccgtaattgatcagcactcattttttcctgattcgtatatggcgtccctggcatcaacttcatcatgaagaaggtcacagaagcgacaatgaatagggttagcactaaatagaatattcgtttaataaggtatttactcataagttcgctcctaacaaaaacgggcttcattgtttttcaacgctgaagcccatctttataaagtcagtttatttttttaaataaagtgagacattattgtagcttcctgaagggccgtagtctaaacctttaaggcttgggttagttaagtacgccacacctgattgatacagtggaatgacacctgactctgtattcataatatcttgtgctttaacaaggttttgccatcttgctttaggatcattggcgttgtcacctttactttccttgatctgtgcatcgtattcggcattgctccaatggccatcattgttatcgccgcctgttacaaacaagtctaagaatgtgattggatctgggaaatcagcgttccaagcactaaccaccatgtcgaaatcaccgttcgttgaacgtgttaaacgagtcttaaatggcacgttcgctaatgtgactttcaaacctggtaagttcttttgtaaagtattttgcaaatattcggattgtttcttggcagtatccgtatcatcgccaagtaatgtgtaattgaatgttttgcctgtttgcccagtttcagcaaggccttcgttccaaagttttgttgcttctttagggttgtaacttgcatttttcttacccgctgcgtctaaatcatcaacaaaatccttcttagttgttgggtcaaatgacatattctttggtgtcacagaagcaattggacttgaaccatcacctagaacctgtgcgactaattctttacgattaattgtcattgaaattgctcggcgaatcttcgcatttttaaagattggattcttttcttggttgacttgcatgtagaatgttgctgatttttgtaaggttgagtaatgtggatcgtttttcatttgtttagctgtgtcaccactgatcgccgtccgatctaatttattactttggaagaggtttaaagctgttgatggatctttaaccacttgatacttcaacgtcttaaccttaactgctttcgtattccagtaattggtgtttttaacttctttccatgagctatctgggccattccaattttctaatttataagggccgttgaaaactaatgttttagaatttgtcccgtaactcttgccagctttcttgactgcttctggatattgggggaagaatgttgaactggtcatcaattgactgaagtatggaattggtttttcaagggtgacttctaaggtgtgtttatccttagctactacacccaatgaattaaccggttccttaccagtcgtgatgtctgctgcatttttaatgccttcatagatataagcatattgtgaaccgacctttggatcaacgactctgcgccaagcataaacgaaatcttctgccgtgaccggttgaccgttgctccacttcgcgtcttttcttaatgggaatgtatatgttaaaccgttattagttggtttgactactttagtcgcaatcgccggtttaatttctttaccctcgtagcggtaaagaccttccatcgtatcggttaaagcctgtgcaccgatcacatccgtatttaacgctgaatccattgtcgaaatgacatccccagttgcaaaactggctgtgtcagtcttaacggcttccttgctacctgagttaccacaagctgctaataataatgtgaccgccactgttgttatacctaataccaaactcttttctcgtttcatatggacactcccttcagttattaaagataataatacatgattaaaaatgaaaagtaaataataaagattaaaatattctaatttattttcattgatacagagccattataagaatcattctaatattataacgcatccgcaaatgattattatgtgaataatctcattttcacaaactgtttaaaatgcaaaaaaataagcctgtcggtcgcgaatactcacaaccaacaggctcgtttttaaggttattatttgatttttgttttaatgtaagcaacggcatcagctaccgtaccgatcttttcagcttcttcatccggaatttcggcaccaaaagtgtcttctaattccaaaacaaattccacaatatcaattgaatcagcatccaagtcttccttgaagttcaattcgtctgttacctgatccttatttaactcaaatcgatcgccaataatagccgcaatcttatcaaagatttcttgttcattcataattaaaaacctccaaattgaaacccttacctacgtacttaacactttgggtatccagtgattatacataacttcgcaactcaattcaagtaaatcaaatcagacttgcgaagtatattgtagcgcctttggaacacattgtccacctattttaatcggtttcttttgggctattttgttggtcaaaataatcgattactttttgaatcgtttggttcgccagcattgcatgaatctggcgaacagtgtagtaaaccgtgcggccatctgcagcaccgtgcgccttaacaacaggggcttttaagcctaataaaacagccccgccataaacagatgtgtcgaatttatcacgaatcccaccaacactctttttcaagagtaaaccaccgattttttctttgacaccagcatccataatcgcatgtttgacttgcgacatcacgattgtggcagtcccttcaattgctttaagcgtcgcattgccggtaaacccatctgtgaccacgacatccgcaaccccttttaagagttcacttgcttcaacgttaccaatgaagtttaacgttagatcatctgccagtagttgatgtgctgccttatgcaactcatcacccttgccagcttcagtcccattattcaacaaaccaattcgcggcttttgaatgccacggacgtcttgtgcgtagaagttccccattaagccatattgatgcaaatgctccggctttgcttcggcgttggccccaacatctaacatattgaagcctaaatctgaattaatggctggtagggtaggcattaaacctggacgatcaatccctttaatccgaccaatcacgaataatccggctgctaagagcgcaccagtattccctagtgaaaagagtgcgtctgcttccccatctttaactgcctgcgccgccagaaccattgaagcttgctttttacgccgaatcgcacgcactggttcatcttcgctggtgattttttcggtggtatgcacaatcgttaaccgcgtcatatcatcaatcaacggtttaatttgtgcttcatcaccatacaacgtaaattcaacatctgttaattctgagcgggcttgtaacaccccttcaattactgattggggtgcaaaatcgccgcccattgcgtctactgcaattttcatcatcattcctctttccgttttcaatctaacgttaggtaattttgcttttgttgttgtaagtatgttttgagtggcgtatggtccggtgctgccaactcaggatcaagcgtgaagattttttgcacttcttgttgggcgacttgtaaactcgtaaagtcggctactggatcgccaactttaaagacgggcaatccagattgacgatcaccaaagacttcccctggtccgcgcaattctaaatccttctgcgcaacgacgaatccatcagtggtttcagtcataatcgtcatccggtcaacaccttgttggttcttcggatcagccaccagaatacagtatgcctttttcttacctcggccaacccggccccgtaattgatgtaattgcgccaacccgaaccgatccgcatcaaaaatgagcatcaccgtcgcgtttggcacatcgacaccaacttcaacgacggttgttgaaaccagtaattgaattttgttctcagaaaaagcgttcataatctgatttttttcatcatcttttaactggccatgcaacaatgcaacatggtaatcaggttcaaattgttccaccaacgttgcgtaaatctcctcggcattctttaaatccatctgttcagattcggcaatcaacggtgtaatcgcaaagacttgcgaatcgtttgcaagttgtttacggacaaagctgagggcttgttcgacttgattactacgcacccaactggtttcaattggaatccgtccttttggcaattcatcaatcgttgaaacgtccatctcgccatacgcggtaatcgccagcgtccgcggaatcggggtcgccgtcattgcaagaatatcaggctgtaaccccttttcacgcaaaattcgccgttggttgaccccgaaacgatgttgttcatcaattacagcaaagcctaacttatgatagaccactgcatcttgaatcaaggcatgggtgccaataataatattgatgcgcccggattcaatgtctgccaacaacgtccgccgttctttagccgtcgtcgaaccggtcaataagccaacagtcacgttcattggtgccaataagcgttgcaagctttgatagtgttgttccgccagaatttccgttggcaccatcaatgcggcttgataacccgcagtcactgccgcgaacagcgcaatcgccgccacaatcgttttcccagaaccaacatccccttggagaaggcgattcatatgcgctggtgattttaaatcaagacaaatttcattcaccactcgcttttgtgcatcggttaaatcaaacggtaaggtttgaataaaatctttaagtgcttcattttggtactgcaaagctaaaccgtttgccacatgccgatcagcctgtttaatggcttgtaattgaatctgatataggaagaactcatgaaaaatagcgcttcggcgtgcttgctttgcttcaggatacgttttagggaaatgcatgccagcaattaagtcgcgttcgttcattaacttatagcgcgtgcgaatatcctctgggatcaattcgggaataacgtcctgatacaaatcaaaggcttcttgaatcatcttgaccagtgtcccttgacgcacacttttattaacggaatagatggccgcaaacaatggattctcagccgattgaaccgctaggaccttcatccccgtcaatgtatgacgtttagcatcccacttgccataaatagcgacatcgaccccggcttcaaacttgtccttaagatagggttgattaaaaaaagtaaccatcacaacgtcatgttcaatcaagagccgtacattcagccgggtcttccctggtccccaacgactgatgaccggatcagcgacgaccgttccttttaacgtcaccttttcctgatctgccgcttcggataaatccttgaccttcaaatcttcgtaacgaaacggaaaataatacaataaatcactaatggtccttatgccaagctgatcgagggctgtcagacgtttcgggccgacgccagctaacacagcaacagaatccgttaaacttaacattgacagcctcctgtaacgtgctttcaaaagcatcctgttgcgtttagcaccattagccaaacaagtagctacgctagtcattcggctaattaaactaatcctcacaggataagcacttttgatacacttctttttcttaacgtgctttttaaccatattccaaggttaaacgtacttctactaaaaaacgggaaccaggtatattcaacctcattcccgttttatttgattaactattcaactgaaatcaagtatgggtaaactggttgattcccttcgtgtacttcaacttctaattctgggtcttgggccataattgcatcactgatttgttcagcttctgttgcatcgccgtcttccccgataataattgtgacgatttcactgtcttcatcaagcattgtttggaccatttcaatggctgctgttaaacgttcagccgttgagaccttaatcttaccatcgataatccccatgtaatcgtctttcttaatttcaagtccatctaaagtcgtgtcccggattgattgcgttacttgaccactaatcacggtatctaacgcctctgtcatggcttcttgattaacagccaattcagcagatgggtcaaatgataagagagcggtcatcccttgagcaatcgtccgactttgcacgattgcaactggaatatcagccacttcggcagcttgttcagcggctaagaagatgttcttattatttggtaataagatcacttgtttagcattggctgctttaatcgcatctaaaatatcttgcgtacttggattcatggtttgaccaccacttaagatataagtagcccctaaactcttgaagagttcagcaatcccatcaccggccgcaatcgcgataatcccattttcaacaggttctgcttgcacaggggcagcagcttgttggtcgttttcaacaatcgtatcatgttgtaaacgcatgttatcgactttaatcttcactaatgaaccaaagtgttggccgtaagccatgactgtccctggatgttctgtatgcacatggaccttcaccacttcttcatcggctaccactaagagagagtcaccaacaccgtttaaatgattgcggaattcatcataatcaaattcgcgatcgacagttgtcccgtcaccaagggcgaccatgatttcagtacaataaccattttcaatatcttctgtacccatttgagcggtttgatgatgattggcattgaccatttcatccatttccgcttcatcaggtgtgtaaagatcttttgcaggtgcttggcctgttaaaccttctaagaaaccttcatagatgaagaccaatccttgaccaccagaatcgacaacgccgacttcttttaagacagggagtaattcaggggtcttcaacaaggccttcttagaaccctcaacaacagcttcgataactgcaccgatatcatcagtttgaccggcaaccttggcaccagctttggcgccttctctggcaaccgtcaaaatcgtgccttcaacgggtttcattactgctttataagccgtttgaacaccatttgtgaatgcgtcagccaaatcttgtgcatccaatgtttctttttcagccatgctcttagaaaaaccacggaaaatttgtgaactgataaccccggagttaccccgagcgcccatcaaaagccccttggctaaactcttagataattcaccgacagattgcgcgttgttttcattaactgctttggccccactttgaaacgttaaactcatattggtcccagtatccccatcaggcactggaaagacgtttaatgaattgacaaattctgcatttttagtaagccgatgtgcagcaacccgcatcattgcttggaattctgctgctgtgatttcagtaactttcacgaatgttcctccttgaacaaaaacaaatagaactggacctagtggccagctccgctaattagttttagtcttctaatacccgtacaccttgaacataaatattcactgagttcgcactgacacccaacattgtttcaagattgtacttcactttactctggacgttacggcaaacttcagagatcttaatgccgtaaccaacaataatatagacatcaatcgcaacgccattgtcttcttgacggactacgacaccccgattataattctcacgattcaaaatatcgtttaaattgtcacggatttgattcttacttgccatcccaacaattccgtagatatctgttgcagcaccaccaacgacggttgcaatcacgttattggtaatatcaatatcgccatattgtgttttaattttaacagccattaaaatagcctccttgtgccatacttattgttattttagcatagcggagaagagttgcaaagcaactggtgatgaattcttccccaaatgcggcttatttttggactttaatgagtttaaacgacttattttggactgtcaagtaaatttccttgaaagagctcttgcattccccaaactattatggtaaattatttaagtgaattgtataagccggtgtgcatgcatgcaactattaagactaactgaatcatattatgtttctcgttaattctaccggctttacttaaaggaggaataagaccatggcaaaagacgttattaccggccgtaaaacatcatttggcaacaagcgttcacacgctttgaacgcatctcgtcgttcttggaagccaaatttacaaaaagtacgtatcttagttgatggcaaacctaaacgtgtttgggtttcagcccgtgctttgaaatcaggcaaagtaactcgtgtataatttcaattgatagatcgccagttggcggtctatttttttggcaaaaagtgcgagataagtcggctaatcctcaggcgatgactgatcgaacacgtttatggcaaccaaaaagacggctcggataaaataattttatccgagccgtctttttaatccttactttgaatcaccgcaaccaccccagtttcaaaactaaattggccggtctcaccgatgaactcattactagcccatgaaatcgggacttgtgtttggtaatccaccaagcgatatttttcatcaattaaatttaaaccagttgtgggaactaatggcacaaaggccagataccgtttatcggcttctttttgtaattgatacgtccctggtgcataaaagcgaatcgtattttgccgatcgcgcatctctaagcggtctaaaaacggcttaaaacggctttctaagggcataaagagattagcaagaaagtggtccaaccgaccgcctgttgcgccataaagcacaacttgatccgcattaaattcagttagcgcaattgataatgccaactgagtgtcggtatcatctttttctgcttgcacagagcgaatatcctttactgctgattgaacggtggtccgctcagccgccgtcaatgaatcaaaatcgccgactgacacgacaggtgttacgcctttttgcaataagcgccacgtaccacggtctgctgtcacccattgaccatcaatcatttctggctgcgccaattcgggggcccactcactgactggtcctcccaccaacacattaatccgcgtcatgagcagcctgctttaaagttgcaatccgggttgctaaatcaccggcaaacgtatatgaaccggcaacgaaaacatctgcgcctgctttggcacacgcaccgacggtttggtcgttaaccccaccatcgacttcaatcgtataatctgcatcagcatgttgatcgcgataagtcgctaattcagtgaccttatccaacatcgctggaataaacttctgcccaccaaaaccgggattaaccgtcattactaagacttgatcaaccaatgataagactggttcaatcgcactgactggtgtccctggattgatcaccacacctgctttaacaccagcatctttaatcatctgaagaccacggtagagatgttgcgttgcttcggtatgaatcatgattaagtctgaaccagctgctgcaaattgttcgatgtagcgttctggttgttcgaccattaaatggacatctaagcctaacgttgtcaatggccgcaagccagttactacttgggggccaaacgacatgttggggacaaacatcccatccatgatatccacatgtaatagatcagcgcccgccttttcaaggttttggacgtctctttgtaagttcataaagtctgcgcttaaaattgaaggtgcgatttgtttcatcatcaaaactccgatcacatttttattttgacttcttgtaaactggccgaatatcctttaattctgctctaaactgtaaataattcgtataacgactttgcataatttcgccactgtcgacagcttctttcacggcacatttcggttccatcacgtgttgacacgttctaaacttgcatccttgcccgatttctctgaactctgggaatcggtcaaccaaggtttcaatcgtgacgtttaataaaccaagtgatgaaaagccaggcgtatcaccaactaacccatcattcaacggaatcagttcaatatgccgggttgtatgtttcccacgatttaaactctgcgaaatttcggcagttgcaatattcaagctcgggtcaatgtggtttaacaacgttgacttaccggcccccgtttgtcctgtaaagacggttgttttatgcgggaacgtgtcttcaattgccgtaattatctccggtgtaaaggcggtccgcggtgcaaaaatttgatagccgatcttcgcgtaatacgccaagtaatcactaatttcttggtattgttgatcactaatcatatcggtcttagttaaataaactaacccttgcatgtgcagcgattcaatataaatcaagaagcgatccaacaaattcaaggagaatgctggttccaccgccgaaacaattacgacagcattatcaatattagcgactggtggtcgaatcatctcatttttacggtctaaaatctcaagaatatagccactttctgtttcactttcactctcgaattcgacaaaatcgccgacaagtggcgtaattttccgtttacggaaattaccacgcgcacgcgttcgataaattttgccttcactttgtacatcataaaacccactgagggcgcgaataatctgtcctgtctgcaataggtcacctcccaattagtttgtcacatggtcatcagatagaatctcttgaccatttcttaaaatccggaaacggccggcttggtccgctttaatcgtaaatggcaattcaacggttgtatccgcggtaatcgtcatttctttataaacactcattattgaatgcgtgctatcttctaaataaatcgtaatcttattcgtcgtagccgttgaagtactacttgaactagagctcgtactactactgtcacccgatttgctcgagctgcttgtactactttgtgaagttgctaaggaattatcaaacggaatcgtaatcgacttcgtaaaactcttggtagcgggcgcttttttacctttagaaagtaccacgttaatattggcaccttcttgaatagatgcaccactaccaggtgattggctaatgactaacccttcatcaatcgtattggagtaatcctctgaaaaagtaaccgtcaaaccaacgtcatcaacatagtcttgaacagcctgtttcgtgtaattactcaaattgcgtaaagtaatgcttggcttgccgctgctgacagtcaaggtaatcgtcgtcttacttgggacaactttttcacctgcggcaatgctttggtctaaaaccagtcccgaagcaacactgcgtgaactctgatatttgcgcacaaccgtcaatcccttttgtttcaataacgtgctgacatctgtgaacggtttgtccgtataatcttcgatctcatactttttacgacccgtactgattgttagatcaaccgtactgcccgatttaacatgcattcctttaccaggtgtcgataaaatcacatgccctttgctgtacttattgctagtagttttttgaatcttaccaacttttaatttatctgcggttaatgctgcagtcgcgttttcttgcgtcatatctgtcacatctggaacagtcacttcactgccttgcattgcgtacgcagcgaagacaccaagcatcactaacaagactacgccaagccccacaaaccaccatttccgcttcgacttcttatgcggctgtttctttttctgatcgtcttttacttcagtctcatctttgggtttggcttctggcgcatcgttttggcgcgtaatcccttctgggtcgagagccggaatcacctttgtttcacccatatcaccttgtgagggcacgaatttcggttcatgcgcccgactagctgataatgaggtactcaaatcagtggtcatttgcccaacatcactgtagcgttcgtccggatctttggcagttgcttttaacacaacgttttccaaagcttgtggaatccgcggatcataatctcgaacgggtggtacagcatcttgaaaatgtttaatcgcgatggaaaccgccgattcaccttcaaatggcaccatacccgttaacatttcatacagaataattccgagtgaatagatgtctgaacgtttcgttgccattgaaccccgtgcttgctctggtgataaataatgcactgatccgagtaatgtattggtctgggtcatcgcggtttcactgagcgcaatcgcaatcccaaaatcgctaatcttaacgttacctgcttcatcgaccaagatattctgtggtttcaaatcacgatgaataatatcgtgcgcgtgggcattttcgaccgctgataaaatctgcgtcataatatcgacgacgcgttgataaggaatcgggaagtgttcaacgatatacttctttaaatctgttcccttcacatattccatcacgatgtattgcatgctgttttcttcaccaacatcatagatactgacgatattggggtggttcaattcagttgtggcaagtgcttcgcgtttaaagcgacgtaccgtgttcggatcgttccgtaaatcaagtcgcagcaccttgaccgccacttggcgatccaaaatcagatcttgggccagataaacgttggccatgccaccttctccaattggacggataatctgatagcggccattgaccgcgtagcctgtctccatcatcgcgcaccctcctcaccagtttgatgtaagattaacgccgtaatattatctaagccaccggcatcatttgcttgttgaattaatgccgcacatttttcttccagcgatgtcggtgtcatcagcgtggtcttaatttgttcatcatcgaccatattggttagcccatctgtacataataatagataatcatctggttcaaattcgtaaattgttacatcggcatcgacatcttgcgaaacgcctaatgtgcgcgtaatgatgtttttttgcggatgatgctttgccgcttcttcggttaactccccttgtttcaccaattcatttaccaaggaatggtcctctgttaattggcggagttcgttattccggaagcgatacactcggctgtcgccaatattggcaactaagtaattggcacctgaaatcaacactgcgacgagcgtggtgcccatcccaaacaaatcatcatactgattagccttcgctaaaatatgtttgttttctttttgtaattcgaaaattaaccatttaaccatggattcaatgtcggtatcatcagttcgttcgaactcgtacccaatatgggaaaccgccatttctgaagcaacatcgccgcctaaatgaccgcccatcccatcagcaacaatcgcaaactgcgcaccgcttttattggtataaaagccgacatagtcctgattattttggcgttgttggccgacatcggtttgaaaagcaactttcataagaattcacctcaattaataatttaagcccgtcgtgttaaacaagcgatgaaaaagccgtctgtttgataatcatcgggatagatttggacaaacggtgtcgcttgattggctggcaatggtttgtcgagtgctactggtacgatttcaaattctggatgattggccacaaaagccgcaacaacttgttgattttcttctgggacaatcgtacaggtactgtaagtcaattgaccacccacttttaaggttggtgcaacggcttctaaaatcgccaattgaatcttttgaaggttcaataagtctgctgcttggcgaccatacttgatttccggtttacgtcgcattaagcctaagccagaacatggtgcatcgactaaaatcttatcaaatgtttcaggttcaaattgttcaccgactttgcgtgcatcgagcgcccgcgcatcaatgacgtctgcaacatgcaaacgcttagcgttttgctcaatcaagcggactttatgttcatgaatgtctaaggcagtaatttgccccccttgactggcatccaaataagtcgccatatgtgtcgttttcccacctggggctgcacaagcatccaagatccgatcacttggttgtagttgcaaacttggtgccactaacatcgagctttcatcttgaattatatacgcgccttgttcgaacaattcaccgctggctaagtgaccgccgtgggcaactaatccagcggctacaattacactcggttcaatcgttaacccgtcagcctgtaagtctgccaaaacggcatcaactgaattaacacgggtattgactcgaatggacgcattcgctggttggttaatcgttgccaataagtgttccaattttgattgccctaattcttggtggaacttcgccactaaccactgcggcatactgtaagtcacacttaggcgttcgattggatcggcaattgctgctaaatcaggcaatccagtccgttgttggttccgtagaattgcggtgaccaacttagccgtgccagcatggcccatttgtttggcaatctcagttgcttcataaaaaatcgcatgttcaggaacacgatccaaataaacctgttgaaaaactgccgtccgtaagacttggcggacccaagttgccagtttagctggtttttgaataaagggggctaggtaataatcgagtgtcatttcatgttgaatcacaccatacacgagctgcgttaaaaaaccagcatcttggggattcaagtggttttgtttaatcacttggtcgagggccaagtttgaataactgttttgtttggcaaccgccgttaaaatttcaacagctaaatagcgtggtgtctttttaggcatcttgcaccaccacttgttgtccgactgcgagttgtttgccaaccccgtttaagaaagattggaccggcattttagccttaccagctggttgaatctcggtaatcttcaaaacactgccattgccggctgctaattcgaaatcctttttgttgatagcgacaatcacaccggctggttgatccgtcgttgtttcagcaacagttgcttgccataattttgtccgttgaccattaattggcaaccaagcgcctggttgtggccgtaacgcacgaatctggttgaccagttgcgttgctggttgctcgatatctaattgttcttgttccttagtaatattgtaagcaaacgttacttgtgcttcatcttgtggtgtccggggcgcggtttgatcgataatgcttggtaatgtcttcaataatagatctcggccgacataacttaacttatcaaataaagtcccggtgtcgtctgaagcttcaattggaatgctggcttgttcaatcatatcaccggcatccatttttttagccatatgcatgatggtaatcccaatttctgaatcgccgtttaacacagcatattgaatgggtgcaccaccacgatattttggcaagagtgaaccatgcacattgatggctgcaatcttagcggcttctaataacttcgttggcaagaattgaccatatgctgccgtcacaattaaatctggttgcaaggccatcacgtccgctaattcttgactaccactgagtttttcaggttgaaaaacagtcaggtttaagcgaacagccgcttctttaacgggtgtttgttgtaggacttgcttgcggccaactttccggtctggttgggtcacaacggctaggacttgataatcgtgtgccacaagggcttctaaaatcggtactgaaaattggggagtccccataaatacgatggatgtcattaatcaatcacgctcactttaagtaaattgtaggggttcattgtccaacccaatcttgaaaccatgacgggtatcaatttgggtcgtttcgagaatctcggcgagtttcgcctgaagttgtggttcctgtttatatttaatcacaatttgatagaaataacgattattaatccgcgcaatcgacttcggcgtcggacccagcacaatcgcttggtcggataagacgggccgtaattgacgggcaatctggaaactcttcttggctgccaacgcttcttcaggatggctaatcgttaactgtaccgtaaaataatacggcggatagccgccccgatggcggactgccatctcatattgatagaagccttcataatcatgttgcttggcaaattggatggcgtaattttccggattaaaagattgaaggataaccgcaccgattttatcggcacgaccagcacggccactgacttgcgtcaataattgaaacgtgcgctcacttgcccgaaaatcaggtaacccaagagcggtatcggcgttaatcacgccgacaagcgttacatcgggaaaatcaagccctttggcaatcatctgcgtgcctaataaaatatcggcatcgtggtcgccaaagcgtttgagtaatttagcgtgcgcaccttttttgcgggttgtatcaacgtccatgcgcagaatacgagcatttggaatcagctcttggagttctgcttcaactttttgtgttcccgttccgaaatagcgaatctggcgactctgacaatttggacaagtccgcggaattgcttcttcatgaccacagtaatggcacttcatcgagtgcgtatccatatgcaacgtgagtgagatatcacagttgggacactgcaagacaaagccacaatcgcgacacatgataaaggatgaaaaaccgcgccgatttaataagaggacgctctgttcgcccttttgcaaccgatcctttaacgcatctaatagcgcaggtgaaaaattgctgctggcttgttgcttcatcgcctcgcgcatatcaaccaactcaactgccggtaatggctgttgattaatccgttgcgtcaggcgcaagagttggtagacgcctttttgggcacgggcacgcgattcaagcgatggtgttgcactcccgagaatcactgggcaatgatggtactgactccgccagatggcaacatcgcgggcatgatagcgcggactttcatcttgtttataggaagcttcatgttcttcatccatgataatcacaccaatattctccaatggtgcaaaaacggctgagcgcgccccaacgacaacgctggcttctttgcgttcaattcgccgccattcatcatacttttcaccttcggataagccactatgtaaaacggcaacttgatcaccaaagcgacccttcacgcgtttgaccatctgcggggtcaaagcaatttcagggactaacattaatgcagttttcccctgttgcaagaccgcatcaatcgtttgtaaatagacttcggtcttaccgctgcccgtaatcccttcgactagaaaaacccgatcagattgggccttagtagccgctacaacggcttctaccgcatcagcctgttcatcagtcaacgccattttttgcgtcgttgtgacggttttaggataaggatttcggtaagcttcaactttaacttggcgtaaccaacctttgtcggcgcctgtcttgatattctcccgggtaaaagtcgtcttggccaaaacatcctttaataagggattgggctgatcaattaaactttgtaaataactaatgagttgactctgcttttgcgctgacttacgtaagccggcccgcgcttcttctaactgttcaaacgataatgccggttcaatcgccgttaattgcttcacgcgggcgcgatcatcgacatggtagaccacttcgattttcccttggcgttgtaactgcatcaattgttttaacttttcgggatctagcgactggtcaaacgttaattcgtcgttaccattgaacaggcttgcttgtaaggctggatcaatttcatcaactagttgcgcggtcttagaatacttagcacgcatcacacttgggagcatcgtttgcaagcacgtaatctgaaaggcataggtccgctctgccaaccaacttgataattgaagtaattctgaattcacagccggttgtaaatcaatgaccgccgtaatcggctttaattgcccctcaaaattggcttgatcttgaatggacaaaataaagccttgaattaatcgatcacctttgccaaaaggaaccgccacacgcatcccaggttgaatactgtctaataaagtatccggtacttggtaatcgtatggccgattagtttgcatcgtcggcacatcgacaatcacttttgcgatttgtggcatctaaatcctcctttttagttaatctaacaagtcagcaactcgttctagaatttgagtcgcaatcacccttttatccgccaacgctaatgtttccggtgctgcattcggttgtaaaagcgtaaccgcattttgatcaacaccaaagccccgatcatgctgactgacatcgttcgccacgagtaaatcaacatttttagctgctagtttggtttgggcattttgtagtaaatcatctgtttctgccgcgaatccgaccaagaattgatgcgtcttctgttgcccaagcgtcgccaaaatatctggggtacggtctaaagttaactgcatctcagttgtgttcggttgttttttgattttgtgcgtgacatattgggccggtttaaaatcggcaaccgccgcagccatcaccacaacatcggccccttcaaagacactgctaactgtgccttgtaattgcgccgccgtttcaacgtaaattattttgtgcaaaccagccgggactggcaattctggacgcgtgctgatgaggatcacattcgcccccatcgtcacggctgcttgggccactgcataccccattttaccagaagaccggttgccaatgtagcgtaccggatcaattggttcttgtgtcccaccggcagtcaccaccacgttctgcccgcttaaccgttgcggtccgaattgttgcgcaacttctgccataatcgcggtttcttcagggaaccgcccgacaccagcatagccttccgctaaaaagccggtatccggttccatgacagtatagccatctgctttaagttgggttaaattccgttgggtagctggattaaaccacatatgttcattcatcgccggcacaattaatttgggcgcggtagtggctaacaaggcggtcgagacaaagtcgtcagcaatcccattagcgagtttcccgattagattagcagtcgccggagcaatcaccgccagattagtccaatccgctaagtgaatatgggcaacccgatccggttggtcttgattaaacaaatcagttaacacgggtttacgcgttaatgtggcaaacgtcagtggcgtgacaaattcggttgccgcctgagtcattgccacttggacctcagcacctgctttaatcaatccacgcaccaaattagccactttgtagacggcaatgccacctgtcacataaactgcaattcgtttattcgttaaatccactttcaaaaccccctaaaactaaaaaaactgcactttaatttaaacatccatcgatgaataaactaaacatgcaggttctttaattattcttattcgctgtctttttgagcgagcttatccattttttcagcatctttttcaagcatcaatgaatcaggatcaataatgacattgccagcagcaatttcttccattgccatcccaaccgttttaggtgatttgtattcagataacatcttaatatcaccggcttcgatttcatgggcccgcttgctagctaaaacagccaatgagtaacgtgagttcacgttttctagtaacttatcaattgaaggatatacaatcatattattattcccctatcattttcttgtattggtcgatcacacgtggcactcgtaagtgttcactttcgataatcttttcgattcgttgaaccgcatttggaatttcgtcgttgacgacagcataatcgtaattttccatcatcttgatttcgtcggctgctttttgcatccgcttatcaatcgttgcttgatcgtctgtgccgcgtttttgaattcgattccgcaattctaataaatcgggtggtgtcaagaagatgaagacgccatcgggacacttctcgcgcacttgcattgcgccttggacttcgatttctaataaaacatctcgccctgagtctagtgtctgattcacatacttcatcggtgtgccataataattatccacgtactgtgcatactctagcataccatcatttgcaatttcttgctcgaattcttctttgctcacaaaataatagtcaacaccatcttgttcgcctggtcttggctttctcgtcgtcatcgaaactgagtagtgaaaatcacgaaattcatcttctagcattgcttgacggacagttcctttaccgacccctgatgggcctgataaaacgatcaacattcctcgattggacatctacgtaattccctcttcttttataaaatagttaaagtctattctgcactatttggcgggaaatttcaagtctactttgtttccatctcatttaaaattaaccttaaggacgcaatttcgtcgtttgacagcgtcacacccttacccattttggcatgatccggtgcccaatctcgcaaatcaaattttggtgcacgttgattccaagagattaaattcaattctttacgccaaccagctggattttcactcaacacaccgatttctgccataatttcatattcaattttgcccatcaaatcaccctttctatcagttcatcctattatacacgaaaaaaatcaaaaaatgccgcttgcaattctgaacgtttgttcgtataataaaaacacaaacaagtgttcggaggatgaaatcatggaatttaaacaagcaacggttagcggactcagtcaacaattggttaaacaatatcaccgcttttttgaacttacaccagaagcgactgcttttgttgaacaaccccaaatgcaacctgctcagattcaattatttatgacccaagcgtttgaacgccactaccatgttgcggtgcaattcaatgttaacgatcatctcgaacaagtgaccgggcgcttggttaaacaactcagtgcgaacaagtatctgctaaaagagagtcgttcgaacctctacaagattgtcctttgcaatcaaattcgttacattcaaaagaaaagttaagcaaaaaaataagggtgcagccaaaaaaatattttggctgcacccttattttaatgtcggcgactttgcttagccgtttccgctaatgccactaattcttcggcatgttctaaagttaactctgttacttcagtccccgctaacatccgcgccagttcagcaatccgttgtttaccggttactttttgaacggacgtttccgttcgattttgttttacctgtttttgaatttgatactgatgatcactcattgctgcgacttgcggcaaatgcgtaatgcagagcacttgcgaatgttggccaatttcactaatcttattggcaattgcttgggccacacgcccactcactccggtatcaacttcatcaaagatgatgctagtaacgccttgtgattcggagaaaatcgttttaagggctaacatcaagcgcgataattccccaccagaagcaattttagcgagcggccgtagtttttcaccagggttgggttgaatgtaaaattcaactttgtccatcccggaggccatgaactgttcctgttcatttggcaagaattcaactttaaagaccgtcttttccatgtataacgcttttaactgttgatgaaccgctttttcaagttgcttagctgctttttggcgtaattgtgtcaacgtttgtccgtttgtcctaagttgttgttcaagttgcgtgaattgctgctccaactcacttgcgttcgcttcagttgcttgcatcgctgctagttcagccccgattttttcaccataagcgagaatttcggcaattgaatcaccatacttatgttccaaattattaatagtttctagccgttgttcgatttcatctaaccgtgcttcatcccattctaagtttgaaacttcccgactaatatcaatgctactatcttgcaacgtgtaataaccagtctgcagactgtccgcaatacgcttgaattctggatcgagttcagcaatttcttgcatctgattcattgcaactgcgatttggtctaacgcattcccgtcttctcctgctaaaatcgtgtgactggcttgcaatgcttggttaattttttgaaagttcattagtttggctcgttcttcgactaacttgctttcttcatcagcctgtaattgggctgcatcaatttcgttagtttgaaatttcagcatatccaagcgttgggcccattcttgttcattttgctgtttttgcttcaaggcacgctgtgctttacgataggcagcataggtttcggcataggctgccttcgcggttgttaacttttggtgcgcaaattcatccaacaaccccaagtggcgatctggatacattaattcttggtgttcattttgaccgtgaatatcaactaaggtttccccaatatgcttcaaagtggttgtattgaccaaatgaccgttgacccgacaaacattgtgtccattaacggctaaatcacgctgtaataagacggtttgttcgtcgtgttcaatgccaaactggtctaatactgcggcggttgtgccattaggcgtcatcgtaaataagccttcaagggtcgcttttttagcaccagtccggataaagtcttgtgaaccccggccgccagcgagtaacccgactgcatcgataataattgacttaccggctccggtttcccccgagagcaccgtcatcccttcttcaaaactaattgctaactgatcgataattgcaaaatcgtgaatgaccaactcttgtaacatctgatcatccccctttcgtttctcttgatgctaaaaaaacttgccaaattactttagcaagtcttcaataaacttcgtaaactgtttagcattttcttctgatttacaaatcaccaacacggtgtcgtcgccgccaattgtaccaaatacaccactgagctgcatttgatccaaaagattagcaattgccgtcccgttacccggtaaggctttaatcacgacaaaatagtcttgttggttatgcgtaatataggcgtcacgtaaaatccgacgcaacttttctttaacgtctaatttcttttcaggcggtaggctatagtgatagccctcgtccgcatttggcactttaatgagctgcatttctttaatatcccgcgaaatcgtggcttgcgtaacatcgatgtcttccgcttgtaacagcttcacaaaatcctcttgtcgttcaatctcatgggtctggattaaattttttaacagtcgttgccgatctaccttgcgcattaaaacaccctcttcatgtgagaaattattctattcctcaatgatagcgcatttatacataaaatacaaagttttatacactattttcccgttggtcgtttcaaagcagcataggcattctctaaaaccgtatcaatattcacgttttgggccatcgttccagtctcagccgtcgtattccgtagatgaatcaagaattcaatattgccttcgccacctttaattggtgaaaaatctaaccctagcacgtcgtagcctgtcgctaaactaaaatcaacgatgtctttaaccaccatcttatgcactttcggatcacgcacaatcccgtgtttaccgacattttcagggccggcttcgaattgcggcttaattaaagcaaccgcttcgcagtccggtttcaagatgggtttcaacggcaccaaaatcttatgtaacgaaataaacgaaacatccgtcatggcaaaatctggttgaccattggtgaaatcttctggttgactgtaacgaaaattaacccgttccatcacgacgacgcgtggatcttcgcgcaatttccatgctagttggttataacccacatctagtgcgtaacagagtttggccccatttctaagcgccacatcagtaaagccccctgttgaagaaccgatatcaagtgcgattttatcctgtaaatcgatgttgaaaacctcgaccgctttcgccaattttaaagcccctcggccaacatacggaatcttacgccctttgacacttaaaacagtttcagcgtcgattttttcgcccggtttgtcgattcgttcatcatttttaccgtacacttcaccagccatcacagaccgttttgcttgttctctggaatcaaataatccctgttggactaataatacgtctacccgttcttttttcatctgttctcctattcattaaaatagtttaaaaaactatttaatagtgctttatctaacccggataaatccgttaaagcagtttgcgcggcctgacaagtctcatccaacgcgtcttttgcaccagctaagcccaataagcctgggaaagtattcttatgttcgtcagcatccttatggaccgccttgcccatcgcttctgtagtgcttgtcacgtctaaaatatcatcttggatctgaaatgccaacccataattttgcgcaaaaagctgtaaactagccatttgttcatcggataaatcagccaaaatcgcccctaagccgaccgcgcattcaatcaaacggcccgttttgagctgatggacttgtttcaattgagctaacgataaagttttagtttgtccttcgatatcttcaatctgaccagcaaccatgccacttggaccggctgcttgcgccaataatcgaacagcgcggctctgctgatcagtcgtcaaatcggtcgtcgttaaccattcaaatgcaagtgtcaataacccgtcgccggctagaatagcttgcgcctcgccaaaaaccttatggttcgtaggttgaccgcgccgtaagtcatcattatccatcgccggtaaatcatcatgaatcaatgagtagctatgaattaattccaatgcccccgctacgcgatacgccgtttgattaatcggtcgccccacacttgcaagcaccgcaaataccaaaagtggccggagacgtttcccgccagccatcactgaataggtcatcgctttttgcaaggttggttcttcaatctgggcaagttgctcagtcaaataggtttcaaatgcgggcacttgttggcgcgcgaacgttttgaaatcaaccattattcttgtgcctcagcatccaatgggacttcttcgccattatctgccatcactttggccatcgttttttcagccttacttaaggtttcttctaatgtttgacttaatttaacacccttttgaaaagcagtcatcgctttttcaagtggcacatcgcccgtttccagttcattcacaattgcttccaattgtgctaagttctcttcaaatgttaatttcttttctgccatcttattcgtctcctttatgagtggccgtaacacgcgcgttcacgaggccatcttggacatgtaactcgattgattggtcgatcgtaaaatcggtcgtttttttcattacattttgattatcatccgttacataagcaaatccgcgtcccaaaattttcaacggacttacgagatccaaggctgccaccgcttgtccagcctgttgccgcctattttggacaaggctctcgattgctcgtttcaaacgatgatcggtatcagtcaacattctttgtgcttgttgaatcgcaccacttggtgattgcgactgcaggcgttgctgcaagagttgtacattctgttgactagtctgtaagcgttgttgttgcgccaacaataaacgacggtgcaactgatcgacattttgtaaatagccgtcatacaagcgttgcggctgttttaagacgtaactgttctgtaagtggaccaattgctttttgtttaatgccaatgttttcgaaaatgcctgatataaccgcaaacgttgttgttgcaacttcaacacttcgtccgtcaaaaccggtgttgctaattcagctgctgctgttggtgtcgctgcccgaacatccgccactaaatcagcaatagtcgtgtccgtttcatgaccaactgatgaaatcaccggaatctgactggcaacaatcgcgcgcgcaacgcgttcttcattaaacggccataaatcttcaatcgaaccaccaccacgaccaatgataattgtatcgaaatccccttgttgattaacttgattcagtcgatcgactaaaatatcagccgcaccgtcaccttgaaccaccgctgggaataagacgagttgggcaattggataccgacgttgcgtcgttgttataatatcgcgaataacagccccagaaggactcgtaatcaccgcaatccgttttggaaagcgcggcaatagttgctttggtgcatcaaacaagccttcagccgataatttagcttttagctgttcataggcttgatacaatgcaccaagaccatctggctccatccgttccacatagatctgatagtttccagttgcttcgtacaaggaaatccggcccacaacaagcactttcatcccctcttcaggagtgaacttaatcttttcaaaagcggacttgaacataatggcactgatcttagctttattatcttttaaactaaaatattgatgcgcattcggtcgtaagcggaaatttgaaatttcgccggttaaataaacccgatccaaatacggatcgcgttcaaatttagcctttaaatactgcgttaatgcggtgactgttaaatagtctgttggtttaaccacgtttagcacgttcctttgcaatctcaatcgtttgatccatgagcatcgtaatcgtcattggccccacgccacgcggaactggcgtcatcgcactaacatgtgatttaagggcttcaaaatcgacatcaccggtgactgttccatcttcaagccgattaatgccgacatcgacaacaaccgccccttctttgacatcctcaatgccgaagaagtgtggtttaccgatggccgccactaagatgtcggctgttttcgttagggcttttaagtctgccgttctgctgtgcgcaatcgtgaccgtggcattggcattgagcatcaaggctgccaatggccgaccaacgatgttactccgaccaacaatcacgacatttttgccagccacgtcaatatcgtgagctgccaataagcgcataatcccatttggcgtacaggccactaagcccggttgattaagccataatcgcccaatattgactgggctaaaaccatcaacgtctttttgtgggtcaatcgcccggataatatggtcttcattaatttgttttggtaatggtaattggactaaaatgccatcaacggtttcatccgtatttagttggcgaacaaccgctaataaatcagcttccgttgtttcagcagacaggcgttttaactcagatgccatgccaattttagtcgctcttttttgcttgctttgcgtataaatcgcacttgctggatcatcacccaccatgacgaccactaatttcggggttaccccttgttgtttgagtgttgccaccgccatttgttgtgcttgtgttaattcatttgcaagtgctcgaccatctagtaattccaaagttaacaacccctatttatcgatatttgatgtttctattttagcatagttaatcggttaattccgggttatcagctgataatgaccgtttaaattcaaaaaaacacgctaaaaaaatactttttaacgtgttttaagtgatttcgttcgtattttactaattaagcttcaacgaatttagataaaacgccgttgataaagccttttgcttgatcatctgtaaattgtttagcaagttcgagcgcttcattcaacgccactttatcgggtgcttctgttgaattttgcatttcaaacaaccctaaacgcaagataattaaatccggtttggctaaccgtgatagttgccagcccttcttcaagtatggcgttaaagcggcgtctaattctgcttgatgttctgtgacgcccgttaccaagaaggcaaggtagtctggaacagcaacttcttcaacttcttcagcatcgaattgatccatggttaaaacggcttggtaagcatctgccaattctaatgtgtcattagcatttaacgcaaacaacacttgaaatgcagcttggcgaatttggtgtcggttaaaattaggcattaagattggtctccattttgatcaggtgtttcatcgttaaataagtcatctggatcaataatttttggtgctttttcagtgacaacgcccaccacgtgtacgttgacttctgctagttctaaatcagtcatgaacaataattgttctttaagggcttcttgcatcgcaagggcaaccttcggcacagaaacaccatagttcagataaacataaacatccgcattcactttgccatcaatcaccttaagagttacccctttaccgtgattcgaacgaccaaacaattcgttaatggatgatgataacgtccctcgcatttggtggaccccatcaatcttgcttgctgcaatccctaaaatcacttccacaacttcaggtgccatttgaatcttgcccaatgcattttcttgtgtatcaagtacaatatttgtttcttctgccatcgaaacccctcctaacaagttcttgctaatttagcctatgcccgtgagatgtaactcccatcagatgtgttaatcgtcaacaaatcatcttcattaacgaaaaacggtacttggaccactaagccagtttcaagtgttgctggtttagtaccacccgaagatgtatcaccacgaacaccaggttctgttgcagccactgctaaatcaaccgtgtttggtaattcaacccctaaggtttcactaccatacatcatgatagaaacttgcatattttctttcaagtatttcaattcatcattgatttgtgctgctggtaattctaattgttcgtaagtttcagtatccatgaagacgtggttgtcaccatctgcataaagatattgcattgattttgtatcaatgattgctttttcaactttttcagttgaacggaatgtcttttcttgattggcacccgttcttaaattcttaagttttgagcggacaaaagcgccacccttacctggtttaacatgttggaattcaacaatccgccataggttgttgtcaaattcaatggtcaagccatttttaaaatcatttactgataacattgtttatcctccgagcattatataagtatgccattgtcctaatcatagcaagaaatcaggctcaaaagcaagtatttctagccttttatccctaaaagtagctataaaaaaagggaccggcacccgccaatcccttttagcgtattcaatcgagcaaaagtcgatctgaacactcacttttagattgtcaatggtttgttgcctgagtaattagtataccagtaaaactggatttacacaaacagagtgtgacatcagtctgggatatctcgaggattaacacagagttgcaaaagattgtggaacaatcatttgtgactcagggttaaccggagagatatgactgatggaacacgtttagaatgtgacgacagccccgcttctctcgcacaaaaaaaacacccacataaagtgggtgtgagaaaaattatttagcttctgcagcgtatacagaaacctttttcttgtttttaccgaggcgttcgaaacgaacgacaccttcgataagagcaaataatgtgtcatcgccaccgcgaccaacattttcacctggatgaatctttgtaccgcgttgacggtaaagaattgaaccagctgttacagtttggccatcagcacgtttagaacctaaacgacgacctgcagagttacggccgttagttgttgaaccgccacccttatggtgagagaagaattgtaaattcatttgtaacatctaaatgcacctcctgtttattaactgtctatttacgttttgtttgtacttgaatgtactgcccgtattgttgcgtaatatcttcaagcgtcaactgcaaattctgcaagagaatctgagctgtcgctaaagcttggcccgaaaccgttgccggaatctgacaagttaacaaaccaccattcaggttatctgcttctacctctggttcaaaaccagcaagcttttgcaaactgttgattgtcccgattgagacagcagaaacagctgcacagacgatatcactcccgtaaggacccgagtcggcatgacccgtaatttgaaaagaaataattttcgaatcggcattgaccgtaaagtcagcttgaatcatcttatttccctcaattaggcgttgatagcgtcgatcatcactttagtatatggttgacgatgacccttcttttgatgactgtgtttcttaggtttgtatttgaaagtaacaactttcttttcgcgcccttgtttttcaacagtaccatcaacagtaacaccatcaatgtttggtgtaccaaccttagttgtttcaccaccaactaaaataacttgatcaaaagttactttttcgccagcttctgcggctaacttttcaacgtagattgcttgaccagcttctaccttatattgtttgccacctgttttgataattgcgtacatgtgtgcacctcctattttttcttagactcgccaactaaggtgactaatcatagtacttaatgccttagtatgcgcggttgcagctgtggagctcacaattacaacgttcatattatatcgaatatcacagggcgagtcaatgctttattacgcctcgacaaaaaattgtgcgacatcgaacgtcgtattaggtgtttgtaccaattggtataacatcttagccatgtagcgtggtgaatacacaagcccgtcattgacccacttaaagaccaacgctaaactggcccccgctaaataatcaatcgtaatactcatctcaatttgatcagcctgtgaagtctgattatagcgcttagccacgtaatcctgcattaattggcgcattgattcagtcagttgtgcctgaaagtgaagcgtcgcctcatttttatagaacactttaaaagcagcttgttgttgttcaacatattcaaaaagtgcctgtaaactgacctgacgatatgtctgatcgaccactacagtcacttgctgataaaaatcggccaccaaatcggccaccgcggttcggatgaaatccactttatcttcataatggagataaaaggtcccgcgagtaattgccgcttgcttggtgattgcttgaatcgaaatcccctttggcgtactgtctttcagcaagataatgagggcttgacgtaattgttgctttgttcgttgaacacgtggatcttgcgctcgtaaatctgtctcacgaaccatctgatagttcccccaatcttttaattaaattcacctgtcgatagtatagccgctcagtgaaaagtctgtccattaatcggcttgataacggcccttgatcagttgaatatcccttagtgtacactgtaaatttgaagattctgttaacgaacacccaaaaagtaaactttatccccccacaaatttaattgttgttcgtctgcggttatagtaaaatgagcgtagtatttcaaatcggatagcgttaggtggtcgtcactttgatttctgcattcttcattattttcatttcaatcgttttattcgccgtcattgctagtcaattgactttcaaaatcggcttaatcacaaattgcgtgctctttatcattttagttggtgttgatgcttatctattcagctggggtagtggttctcactgggtgtacgttattgtcagcctactcggattagtcgctagcgaattattattagctgaactcccccatcttaaataattaggttaacgtcaaaaagcggtccaactcatcattgagttgaaccgcttttttagtgcccctgccaaggactctcagtataccatattaatcaagtaaggttgtttctttcacttcatcaattgtcttggtaccagccaactgcatggtaatcgataattcatggtttaagtgttcaaaaacagattgtaccccttgggcgccacctaaatttaaaccataaataattggccgaccaatggccactaaatcagccccacttgcgagtgctttaaagacatgttcaccacggcgaataccactatcaaaaacgattgggacgcgttttgcgacttgttgcgcaattaaaggcaacacttcaaaagaagcaggcccgccatctaattgacgcccaccgtgatttgaaacccagatgccatctgcaccagcttgaatggcaatttcagcatccactggtgattgaatgcctttaacaaagactggcaaatttgtgatttgtttaatcttttgaatatcttctggtactaatccttgtttagcggcagcataaatttcagagatgcccttcccagcaccgtcagaattactataagctgctaaattaggcattggtagtgggaattggaattgcgtctcgatgtccgcttcacgataaccacccaatgttgaatcgacggtgagaataatggcttttacacctgccttaacggcttttttcaataagaactcattgaattgatcatctttactcatatagagttggaaaaattggggggcatcaggagccgctgcggctgcatcttccaccaatgtattggcataggtactaattgagaaaatcgaaccagccgctgcgacccctttagcagtgtcgacttcccctttttcatgtgctaacccttgggctgctgagggggcttgaataatcggcgtttttaaatcaatatcccataatttagtatgtaaatcagcatgatcgatgccttttaacacacggggcattatttttttagtattgaaagcactggtattttcagccatcgtccattcgtcttcagcaccgccacagatatagccaaacgcgccagcttccattcgttctttcacgcgtccttctaacgacgctaagtttaaaatatcgattggattttccgcttcacttgtatgatatcccatgatagattccttctttcaataattgaatacctttatcatggttctcttatcaaaagtaagcaaacatttatactcggttatttcacttgcgttcgaaatccaatgtcttgccggtaaaaagtcgtcggtaaagcgagttgcgctaaatcccgatagacctgttgactagctcggcctagcgtctcagcagaataactagcggtatacaaacgcccgccagcgctgaccaattgattggcttgttctgcgacactagcgaaactaaatgtgctgttgcgttttgcaaattgttgcaaagtgggtaaaacaaacggcgttgtcgattgtgtcgggtaaccatctgaagccaccacaacacctaacgtaatgcctgataattgccactgtaacgttggggtttcccccttcaataattgtgcaaaaacttgggcccagtcgcccgtcatccgtggtagcaccacttgtgtttcaggatcaccaaagcgcacattaaactcaatcactttcaccccgtgttgtgtggcaattaagcccgcatacaagacaccggtaaaaggcgtttgacgttcagccatcgttgccacaatcggttctaaaatagtcgttaccgcttctgcaacgcattggtcactaatctggggtactggacaataagcgcccatcccacctgtattaggcccacgatccccgtcaaaggcgcgcttatgatcttgagcaaccggtaatggatagacgcgattattcgccaccaacgccatcagcgagaactcttcaccttcgagataatcttctatcaataactggggcacgccctgttcaaagaacgcctgaacagtttgccgcgcgctcacgtcattttgagcgatgacgacgcccttgccagccgctaaaccatccgctttaatcacaacgggataacgaacgtcatcgagggcatccagtgccgcttggacagtctgataggcttgataagccgccgttggcacatgcgcggccgccataatttctttggcgaaagttttagacccttccaatgccgcagctgctttacgcggtccaaagatcgctaatccagcgtcttgaaaagcatccactacgccagccactaacggttgttcaggcccaacaatcgtataggcgacctttttggcctgcgcaaaggcaatcatcgctgcaaagtcagtcatctcaatcgcaactgtttgaatcccatccaattgcatccccggattgcccggcaaacaatagaccgttgcaacagttgaactctgctgtagcgcacgcgcaatcgtgtgttcacgcgcgccgctaccgattactaatagatccatgatttgcctcctattggctagtgtttgaaatgacggcgaccagtcgtcaccatactgattcctttttggttggccatgtcgattgaatcttgatccttaatcgaaccaccaggttgaataacagctgtcacaccatgttctgcggcgtattcaacgctgtcatccattgggaaaaaggcgtcagatgctaagacgaacggtgcttttaatccattggcttccgcttgttcgattgcaatcttcacagagcccacccgattcatttgccccgcaccaatgccgagggtttggtcctttgttgcgaccacgatggcattactcttaacgtgtttaaccacacgttgggcaaataacatcgcagcttgttcatcagccgttggtgttttgtccgtcacaaccttcaattcagatgcttgatcagtcacccgatcacgttcttgcacgagtaagccgcctaaaacagaaaccatttcgaagcgatccgcttgcttagcagcctcaaaatcaagcgtcatgacgcgtaaattcttcttcttttctaaaatggctaacgcttctggggtgtagcttggtgcgatgataatttctaagaataaactgtgtaattcttcggctgtttgaacatccacttcacgattcaaggcaatgatccccccgaaaatcgatactggatcggccgcgtaggctttttgccaagcttcatagatggttgcacccaagccgacgccacacggattcatatgtttcatcgcaaccacacaaggttcgctgaattctgcgaccactttaaccgccgcatccgcatctttaatgttgttatacgataattctttcccgtgtaattgtaccgctgaggcaatcgagaaagccgttggtaaactgctttgatagaacgctgctttttgatgggcattttccccatagcgcaacgcttgtttaaagtcgtatgaacgtgttaatttttcagggaattcgatgccgactgcttcggttaaataaccggcaattaagctatcataagctgccgtgtggcggaatgccttggctgctaaataacgacggtaatcaactgcagcttgcccctcatcgacgacgtgttcgaggacttgcgcgtaatcttgttgatcaacgaccacgtacactgatttgaagtttttagcggcagaacgcaacattgaaggtccgccaatatcaatttgttctacagcttgcgcttcagtaatccctggtttttgaattgtttctttaaaaggatacagattgacacaaactaaatcgattgtctggatgtcatgggctgctaaagcggccatgtgtgttggttcgtcgcgtttggcaagcaagccaccatgaatattgggatgaagtgttttaacccgtccatccaacatttctgggaaatgagtgacttcatcaatcgcaattactggtacttgcgcttcttgtaataccttgaatgtcccgcctgttgagatcacctcgtaaccagctgctactaatcctttagcaaattcaataattcctgttttatctgaaacactgaccaacgctcttttcattgattgaattactccttctattttggtttttaattaattcagcaacaacttgcggataaatcgcgtgctctgtatcgtgcacgcgttgttccaatgcggctaaactatcgccaggcaacaatggtacttttgcttggacaatcatcggaccgctatcgacaccttcatcgatgtagtgaatcgtaacgcccgtttcagccacttgtgccgcataggcccgttcaatacttcgtaacccagaaaaggccggtagtaacgacggatgaatattgataatccgttgtgggtaggtatgcaacaatactggggtaatcacccgcatataacccgctagcaatatataatccaactgtaacggtgccaacagcgcgacaattgctgcttcatagtgttgtcgatcatcataatcacttaagcggatgaccgtcaccggtacatttcgttggcgcgctttttcaatcaccggtgcgcccggctggtcacacactaaattcataatctccatgcccgctttttttaaggcgtcatcatctgcaagtacttcaaagttagaacccgttccagaagcaaaaatcgccactttcatctcatcaacccaccaattctattgcattttcttgtcgcggtttaaccgacccaattcggtaagcctgttcttgttcagcgttcaattgggcgaggacttgtgccgctttttctggtgcgacggctaagaccatcccgatccccatgttaaaaatgttatacatctcgagtgcatccaattgcccatattgtttaagtgccgcaaaaatcggtaagcttggccatgttcccaattgaatttcggccatcacgttgtcaggcaacatccgcggtatattttcaataaagcctccaccagtaatgtgggccgcgcccttaataaagccttgttcgataaacggctgacatgcttgtgtataaatccgcgttggtgttaatagccattcaccgagtgtctgaccaggcaattcgggtaagtgactgtcgacggacaacccatgttgttcgaagaaaatttggcgcacaagtgagtagccattcgaatgaatcccactggacgcgattccgattaatacatcccctgtttgaatcgtttcaccagtaattaattgagcttgatcagcaattccgactgcaaaacccgctaaatcataatgtttttcagcatacatacccggcatctcggccgtttcaccaccgattaacagcatgtcagcagcttggcagcctgcaacaacgccgctgacaatttgttcgatcttatccggctgcgtttgaccagccgctaagtaatctaagaaataaagtggcttagcgccttgggcaacaatgtcattgacacacatcgcgacacaatcaatcccgatggtcgcgtgtgcatcagctgcaaaagcaaccatcaacttggtcccgaccccatcggtacttgaaacgagcaccggattttcatactgccccatcgctaaggcaaactgaccaccgaagcgaccaatattttgattggttgcgccgacttgcttttgaatccgacgaactacttcgtaaccagctgtcacatccaccccggctttttgataagcgtttgtcatgattattactccttatctgcttttaaacttgcctggtaggcagcttcataatcgtaaagtggcgttggataatcaccgttgaaatacgccatacataacccggaatacggcgcatcttgttgtaacccaatcgcgtcgatgagcccttgttcgcttaaaaagccaagcgaatccgccccaatcgtagcgcacatctcgtcaatgctttgatgcgcggcaatcaattcatcgcgcgtttgaatatcaatcccataaaagcaagggtacttcagtggcggcgatgcaatccgcaaatgcacggataatgcgcccgcttctttcaaacgtttcacgatgtgcttgctggtcgtcccacgcacaatcgagtcatccactaaaacgattcgtttaccagccacaacacttttaaccacggcgagtttgcggtttaccccttgttcacgaagggcttgcgttggttcaatgaacgtccgccccacgtattgatttttaacgaggcccatttcatacggcaaaccactttcctcggcatagccactagcggccgataacgatgaattcggcaccccaattaccatatccgcatcaactgcggtttcgcgtgctaactgtttccccattcgtttgcgggccgcatggacgttaatcccacagatatcagaatccgggcgagcaaagtagatatattccattgaacagattgaatgcgtggtttcggttgtgaagaagtcagaatgtaacccgtccgcatcaatcgtcacaatttcgcctggctgcacatctcggataaaagttgcttgaacggtattgagcgcacaggtttcactggccacaacgtagcccccgtttgctaaacgtccaatcgagagtggtcgaaagccgttgggatcaagcatcgcaatcaatgaatcttgcgttaataataggtaggcaaagcccccacgaatttgttgaagggccgtcttaatttgcgcgtgcaaatcaggcccttctgtacgtcgaatcagatgcatcagaatttcagaatcagagctcgattttaagatggcccccgattgttcaagcatgcggcgcagtgtgaccgcgttggttaaattaccattgtgtgcaagtgcgaattgatcggttgcaaaatcgaataggaacggctgaatattttctaaaccgtgactaccagcggtcgcataacggacatgaccgattgccgcgtccccggttagttgggttaagtgctccggtttgcggaaaacatccgccaacaaaccacgattgcgataacccattaagtgcccgtgatcattagtgacaatgccggcaccttcttgcccacgatgttgcaaactatgcaagccaaaataagtcatttggtttgcttctggactaccccaaatcccaaaaacaccacattcttcatttaaactttttatttcatttgacatggtatcgccgtctcccaacttaacttcgcttcagtcaccgataactcaacagttgattcagtcgtttgcacttgcataattggcgtggccgagaccgtcccaattaattgcgcctgatcttgacagaacgcttcaaacgccgtctgattttctggccgaaccgtgatgataaagcgggattgcgtttcaacaaataactgttgttgattaagggggacttgcacgcggcagccgagttgttctttaaaagtcatttcggctaacgcaaccgcaaaaccaccctctgataaatcatgtgcgctagtcacccagcccttttgaatcgctgctaagacgcaatcttgactcgctttttcagtggctaacgaaaagccgcttaatcgtcctgcaactttgcccgtcaacatcttttggagttccgaacccgctaaattcgtatccgtctggccaacgaggtagattaaatcccccgctgacttaaaatcttgcgtcgtgatgtcggctgtatctcgaatcaaaccgaccatcccaatcatcggtgttggataaatcgcttcgccattgaattcgttataaaaagaaacattaccagagatgaccggcgtatcgaaaacctcgcaggccgccgcaatcccttgggcactttgatcaaattcccagaatacctctggcttttccggattgccatagttcaaacaatccgtaattcccagtggttggccccctgccgcaacgatattccgtgctgcttcggcaactgccatttgcccaccgacttttggatcgaggtataagtaacgcccgttacaatccgtcgtcatcgcgagcgcttttttagtcccacgaattcggacgaccgccgcatcgcttcctggtaaaacgacggtattggtcttcacttgtgcatcatagtggctgtatagcgagcgtttgtcagcaatcgtggattggcccaataaatcgagccatgttcgtttaacatcattaatcaccgactgataaggcgccatcgctttaaattcagcgatgcgtgctggttcagtttgtgctttatgataaatcggcgcatcactcgttaaagccgccactggcaaatcggccactaattgcccaccatgccacaattgatattgttgactctcagtcacttcaccaatccggaccgcatccagatcatatcgttcaaacaaggcaaccacatctgtttcatgaccagctttaacacaaagcgccatccgttcttgcgattcagaaagcatgatttcataagcggacatctctgtttctcgttgtggcacaagatcaagattgagaatcatcccagtacctgccttttcagccatttccgctgttgaagaaactaagcccgccgcacccatatcctggatgccgactagccaatctggatgcttcaaaattaattccaaacaagcatccattaatagtttttccataaacggatcacccacttggactgctgagcgttgggtcgccttgccatctgcaaattcatccgatgcaaaagtggccccgtgaatcccatcgcggccggttttagccccgacgtagaacacactattgccagcaccacgcgctttaccttgctgaatatccttttggtcgatgacaccaacgcacatcgcgttgacgagtggattagtctgataacatggatcaaatccgatttcaccaccgaccgttggaatcccgatacaattaccgtacccgccgattccagccacaacttcttgaacaaggtatttcgtgtggtcatccgtcaattcaccaaagcgcagactgttcaaaagcgcaatcggcgtcgcgcccatcgaaaaaatatcccgaataataccgccgacaccggtggccgccccttcatagggttcgactgctgagggatggttatggctttcagctttaaagaccactgcttgaccatcgccaatatccaaaatcccagcgccttcacctgggccttgcaacacgtgctgaccacttgttggaaattttttcaaaaccggcttcgaatttttatatgagcaatgttcactccacatcactgaaaataacccggtctccgtataattcggcaaccgttttagaattttagtacgaatcaattcatattcatcatctgataacccccattgctgataaagcttggtggcttggatttctgccggtgttggttgctttaacacggttattgccctccttttcgaatcgatgtgattaatgctgcaaataaacgttgcccatcatcgctacctaataaggtttcgactgcgcgttctggatggggcatcatccctaagacattgccggcttcattcgtaacgcccgcaatattcgctaaactaccattcacatcattttgataagtaaatgcaatttggtggttcacttttaaccgttccagggtctctgcatcgcaataataattcccttcaccatgagcaatcggcaaccgaatttgttcgttcggcatatagtgttgggtgaacatcgtaccggcattggtcacgttcaacgcgactgtgtcacagataaaatgggtttgtcgattcggcaaaagaacgcctggtaataacccgagttccgttaaaatttggaacccgttgcaaataccgataaccggtttgccagcagccgcaaacgccttaactgccgtcataatcggtgccaacttggcaatcgcaccactgcgtaaataatcgccgtatgaaaaacccccgggcactaatacggcatcaaaacctgccaagctagctgctgtgtacgggacatactcagcgttttcatgacaaacatcttcaattgcatgatataaatcagcgtcacaattggaacctgggaaaactaatacggcaaatttcattgattcgtcgccaccttttgtatgtcgtagtggtattgttccatattaggattggctaagagttgatcacagatttgtgcgacctttttttcaactgcggcttggtcatcgccagccacttgcatttcaaaggacttgccaatgcgcatgccgctcacaccatcaaagccaagtcgttcgatagctttttggacagcctggccttgtggatctagcaccgaatctttataagtcacttgcacacgcacattaaacatctgtagaaccccctaaaattttttctaatcgtcgtaatacgacatcgtacaccgatactaaatcccctttgttcaagcggaaaacatccttatctagcgattcatgcgtcgtttgatcccacagacggcagttatctggggaaaattcatccgccaaaatcaagcgaccgtcataccggccaaattccaacttaaagtcgattaaatcgatatccgcacggtcgaataaatcgattagcagctggttgatctgcttagtttgtttttcaatcacttcaatttccgccggtgtcacaattccaagcgcggtggcttgcgaaatattgatggctggatcatctagtgcatcatttttgtaatagtattcgataatcggcgtggccaatcgtttgcccggtgcttgaccaaacttgcgggcaaaactccctgccaccacgttgcgcaatactacttctaggggcacaatcgtcactttcttgacgagctgttcagttgctgaaatattctcgattaaatgcgtttcaataccatttgccatcaagtatttgaaaattaatttcgaaatctgataattcaataatccttttcccgtaatctgttccttgcgtttgccatttaacgccgttgcttggtccttatagaccattctcaacacattttgatcgtcagttgtaaaaacatctttcgcttttccagaataaaacaacgtctcactcatgcttgaatccctccaaataacatacattttatttaaaattaaaataatcgttcgtgttacattagggtgtaaaaaaactttgaaataacctcatttcaaagttttcatcattattcgcccaaaccaacgcggtcaaagatttctgcgacgcggcgaatatggtaatggtaatcaaacgcgtcgtctaaatcagcgggcgtcaacacattcataatccggtcatccgcttctaacaacggtctgaaatcagtttgttgatcccaagcttgggccgttttaggttgaatcaagtcataagccgcttctctcgaaagcccatgatcgattaacttcaaaagaacccgctggctgtaaatcaacccgaaagtccgccccatattacgcttcatattttctgggaagactgtcaagtccgtcataattttggtgaaccgtcgaagcatataatccaacaaaatcgtagtatccggtaagatgatgcgttcggcagaactatgcgaaatatcacgttcatgccagagtgcaacgtcttcatacgccgttaccatgtgtccgcgaatcacgcgtgccaagcccgtaatattttcagaaccaatcggattccgtttatggggcattgctgatgagcctttttggcctttcgcgaaaaattcttcgacctcgcgggtttcagatttttggagaccccgaatttcagtcgcaaacttctcgattgaagttgctagtaacgccatttcagccacgtaggcagcatgcaagtcccgtggtaagacttgtgttgagatttcttgggcgcgaattcctaaatggtcgcacacataggcttcgacaaacggtggaatattggcaaacgtgcccaccgccccactaattttaccggcttcaacgccttttgcagcttcttcaaaatgtgccttatgtcgttttaattccgaataccatagtgctagcttcaacccaaacgtcgttggttcagcgtgaacaccatgcgtccggcccatcatgaccgtatcttggtaacgtttggcttgtttggcaatcaccgccaatagcgcatcgatatcggcccgcaaaatggtgttggcttgtttcaacaaataaccatacgccgtatccaccacatcggtcgatgttaaaccatagtggacccacttgcgttcatctccaagtgattcagaaactgctctggtgaaggcgacaacatcgtgccgcgtttcctgttcgatttctaagatccgtggaattgagaacatcgcattggcacgaattttcgcaacatcttcagccggaatgtgtccgagttctgaccaagcctcatccgctaaaatttcaactgccagccatgcctcatatttattctggtccgtccaaatcgcacccatttcaggatttgtataccgttcaatcatttattagcgtcccctctagtcccaaattttagtctttttaattgccgttaacgtttcatcaacagccggcgttaataacgtgacgtggcccatcttgcggttgaccttttgaaccactttgccatagtcgtgataatgccaatctgctgactgccgactggctgttagcgctgcttgccagtgctgcccaagaatattgaccattaccgctgattgccacaattgtggtatttggagtggccagttgcagacgccccgaatgtgggttgcaaattgagaaaagtcacacgcttcaatcgttagatgacctgaattatgcggccgcggtgcaatctcattaacgtagagttgcccgtcatggccgacaaaaaactcgacacctaacgtgccgactaattcaatctgcgtggcaatttttgccgcaaccgattccgcttgtgccgctaacgccgctgaaatgcgcgccgggcagatgctgatatgtaaaatgttatctcggtgttgattctcgattgcgggaaaaacggcttgttgcccggctgaattctgactaattatgaccgaaatttcttgatcaaaatggaccatcgcttctaatacacaaacactagcggttaacaactgttgagccacctccatatccattgcggaccgtagaatgacttgtcctttaccatcatatccaccgcgcgtggtcttcaagatacaaggaaaaccaacttttttaacagctggtattaattctgcaggggtcgttacaatctcaaaggtggcatgtggtagctgttggtcaacaagaaattgtttctccaacaatcggtcttgagcaatccgtagcgccttcgtcccttgaggaatccatgtatattctcgggcagcttcaatcgtcttagcatcgacgttttcaaattcatatgtcaacacatcgacacgttgcgctaacatcataatttgtgcctgatcatcataagctgccacaatttgatcatccgcgacttgtccggctggacagtctgcctgcggatctaagataatcactgcaaaccccatctctttagccgctaatgtcatcatctgacctaactgaccgcccccaacaatcccaatcgtttgccctggtaaaatttggttagtcaaagtctgcattacttgccaccgcctttgcatgcatccgtgcttgatactgttgcagtgccacttgataagctgggacctgcaagccacaaatctgtgtcgctaaaataccagcgttaacggcccccgctttaccaatcgcaaccgtcgccactggtacgccacctggcatttgcacaattgataataaagaatccagcccactaagtgccttactttgaattggcacgccaatgactggtaagactgtattggcagcaatcatccccggcaaatgtgcggcaccacccgcaccagcaataatcgcacgatacccgttcgcctgtgcttcttttgaaaaggcgaacatttcatccggcatccgatgagcagaaataatctgtttcgtataactcacgcccaactccgataatacagaagcggtctgttccattgttccccaatctgatatagagcccataacaagtgccacatcactcatattctttgcccactttctcgttgttgattatgctttgattctaacaatcttcatctgatatgtcaaaacattttacgaactattttacataaatatatttaataattcgtatttaaatcataaatacacaaaaaaaacgattaacctgttggttaatcgtttttttatcgttatggcaatacaacgaagagtaatgcacctaaaatcccaccgatgattggaccgacaactgggatccagctgtatgaccagtctgaatcacccttgttggcaatcggcaagactgcatgggcaatccgtgggcctaaatctcgagccgggttaatcgcgtaaccagtcgtcccaccaagtgatagaccgattgctgtgataaccaccccaaccactaatgggttcaaaccggctgttaattcaccacgtgttaatgctaataaagcgaagattaagacgaatgtcccaatcaattcactcattaaattggcaaatgggctgcgaatcgcagggccagttgcaaaagtgcctaagattgctgcttgatctttagtagcttgccaatgtggatagtattgaatccaaacgacaactgcgcctaagaacgccccaatcatttgggcgataatgaatggtaccaccgctgcccaaggggtcttgccaatcattgcaaaagcaatcgtcaccgctgggttcaagtgtgcaggtcccataaatgcagaggtatatacccctaaagtaaccgcaaagccccaaccaagcgtgatagcaacccagccagcaccgttggcttttgtttttgctaagctaacgcccgctacaacgccatcccctaaaagaacaaggataaacgtcccaacaagttcaccaagcgcctgaaccattattgaatgttccatgagatttcctccaagttaagtcctattttaaatagtctaattgtgcttcaacaattgctgaatccaataattctgtttgacgtgctttttcagcgtcatcccagttcaataaacgcgccatttcatcaacaactggttgtttgatggctgctaattgatcattgtggaataagatgaagtttgtccgtcttaaaagataatcaactggtgttaatgtcatttcttcgttaactgagtatcttaagctgattgtttctttcaagttcaagccttcagcagcaccttggtccgcgtatgaaacaacccggctgacgtttgaaccgaagcggtttgctaaatcaatcgcatcttcttcatcaatccctttgttcattgcaacttttgcatagaatttaagggtatcatccacgttatttggatcgaagtgcccacctgaaacttgtaatttcttagaatcgatttcacgaactgtttcattgaaatctttcttcaagatatcccggattaattcaagcgcaccggctgccatcttacgataatcagtaatcttaccacctgataaagtgattaagccgttttcagccactttcaaatcactaccacgagaaacttgtgatgggttgactgattcttcagcatgcgccgttcttaattgactgattgctttttcaacatctgcacgagcagctgttttgttttcgtaatcatcaactgtcttgattaagttgttgaatgattcttctgaaaccttaccgctattagcgccaccaccgttataatcggagctaccgttattagaaattaatggtcgtaaacctgcccagctagcttcaatatcgtttaaagcgatattaacgctaggatagcgattgttgattgcttttaagaggtaatcaacgtctgcttgttcaacacgtgggtgtttgaaatcgcctgtgtaatcagtatcagttgtcccgaagtacgtcttaccttcgcgtggcacaacgaaaatcatccgaccatcatgtaagcctgaatcgaagtaagttggttgtggcactgataaacgactactatcaacaactaaatgaatccctttagtaggacgaagtgtttcttgtgctttgacttccgtgtttaaagcatttactttatccacccaagggccagcagtattaatgactaatttggcatgaatatcgaatgtttcatccgttaattcatcgtgtgctttcaaaccgtttacgcgaccgtttgcatcataagtcattccgactgctttaacgtgacttgcgattgatgcacctaattcgtcagcttctttaatattttcgatgactaagcgcgcatcattattgacgaaatctaaataaacaccagcacccatcaaacggtctgacttcaagccaggttcgcgttggagtacttctttacgatcaattgtatagttggcatattgtgtaccagttacccctgccaatttatcgtataaatccatggcaatcttgacactgaacatgtcgtaagttgcttcaggttcatcatagattggtaaaagcattggtgtaggccgtgggatgtgaggtgcaatcccttgaacaacggcccgttcactaacagtatctgcaacaaccccaacgtcgaaagtctttaaataacggataccaccgtgaactaacttcgttgaacgtgatgaagtcccctcagcaaaatcttgcatttcaatcaaaccggttttgatgcctgatgcagccgcttgaatagcaaccccagcaccagtgatcccgccaccgattactaataaatcaagttgttcgttctttaagttattaattacttgttgacgtccttctaatgaaaatgtcattataatcctcctcattcacgcattttatatggtcgatgtttgaaaacctttgttgcttcaactgcttgttgccaaccagcatagagatcttcccgttcttcttcaggcatttctggttcgaaacgttgcccaactgagaaaatatgcgccaattcgtctgtatcttgccagaaaccaactgctaaaccagccaaaaatgcagcccccattgcagttgtttctaaattagctgccttttcaatcgagctattcaaaatatctgcttggaattgcattaaatagttgttgtttgcagcaccaccatcaacgcggagcactttgatatcaatgccagtatctttttgcatggtttgaacgacatcccgagtttgataagctaatgattgcagtgttgccttaataacgtcttgtcggttcgtcccacgcgtaatccctagaattgaaccacgtgcttctgagtcccagtatggtgcacccaaacctgtaaaggcaggcacaacataaacttcatttaaactggttgaagccttagcggctgcttctgaatctgatgatttttcaaccagttgcatactatcacgcaaccattgaacggctgaaccagcaacgaagactgagccttcaagtgcatagttgactttaccattgattgaataaccaattgtcgttagcaagttgttttctgacattgttggtttttcgccagtattcatcacaataaatgaacctgtcccataggtgttcttaaccatccctggttggagagctaattgaccaaataatgcggcttgttgatcccctgccatccctgaaattggtaccgtgctaccatagaaatgataaggtgctgtttcaccataaatttcagagtttgaccgaacatcaggtaacatggcccgtggaatgtttaaaatcttgaggatttcgtcgtcccaatccaaatcgtgaatgttaaacaacattgtccgacttgcatttgtatagtcggtaacgtgtgaagcgccacctgttaacttccatgtaatccaagtatcgatggttccaaagaggagttcgcccttttcggctcgttcttgtgcacctggcacttgatctaaaatccaacgaatcttagtcgctgagaagtaagcatcaattaatagccccgtcttttgatggaataattcttcatgcccatctttcttcaattgttcggcaatgtcatttgtttgtcttgattgccaaacaaccgcattataaattggtaaaccagtttccttatcccaaataatagttgtttcacgttgattagtaatcccaatccccgcgatttgatggggttgaatccccgatgatataaaagcgtttgcaatcgtcgataaaacagcgttccaaatttcgtttgcattatgttctacccagcccggttcggggaagtactgggggaattcacgctgtgcatcagcgactttttgaccattgtgatcaaaaatgattgaacgagtactggttgttccctcatcaatcgccaaaatgtatttttcagtcatcttaatcctcctttaacaacaatgttaggaaaacgtttcctcgaaaactattatagattaccgatgtccaaaaagaaagcgtttttcccaaattaaattttacacaatttaacatccttaccaattcggtatttgtagcacatccaaaattaaaaaacgggtcaataatctcagatcaacactaattaaagtccttcatctgaatcattaaacccgtttttttacttaaatcgttgcagttattttagtatataattcaccgttcatcttgctgagcgaaaccttttcgttcttttcgtttgaaaataacacgatatagattcggccaccgtggctaaatccgttcgacacattccagcctgacaaataaccacgattaacaatgagtgctggatcattgtaaaagcccattccatagtgggacgtactccctggttggaacatttgagccttactctgttcattaattaattttccagtccacaacgcgcggtcaaaacggtacatatcagtcgccgtcatatacatatctccgacccctggtagttgcgtgaaattggggagttgtcccgcagcgccatttgccagatagccaatggaagccgctggtaatcgcgaatattgatccgtcatgaaaccagtatgcgccattttacttggttttagaattttttcttttagatacgttttgtaatcttgatgactcactttttccaaaaccttcgtcagcacaatatagttcgcatccatatagtgccacttgcccggttgttccttaatcccatttttaataatttcttcgattaattggtcgagagtcttcgtctgattatcttggtcccgaccgacaatgcctgatgtatgatgtaaaaaatcagtcagtttaatctgctgcccattcggaaagtccgggaggtaccgactgattggatcgttgacgtttagctttccttgttcttgtaactgcaataaactcgttgcaatcaacgctttttcagttgaaccaatcgcatatagcgtatctggcgtattcaccaactgcttggcccgattagcactgccgtaccccttatccaacaaaacttgcttatcgcggacaattaacgcggtacctgaaaagccaatttgctttaagtagtcatctaacgcttgttctgcaacaattgtcggttggctttctgctttaagtcgttcttcctttgctttagcagcagcgactttttgtgattcgcgctgtttctttgcttcttgcgcttgtcgttggcgcttaatcttggcttgttgttgcgcgatttttacttctcgttggtgatgttgtcgctgaaccacaattccgcccgctaccagaccgaatatgaccagaataccaatgacaccaccaatttgacgccctttttttgacatcaactgtccctccgaaatttctaatctatccattaatttattacaatattaatgtacaatacgcttttggatttgaacagtgacattattgtcatctaaccacacgcaaaaaagcggtcgcgacaaaaaatgtcgtgaccgcttttttggaaccagacgttcttatttaactaataaaacattcgttgcagcatgggcactaacatattgggcaaccgatcccatcatcattcgttcaataacccctttccccgtaatccccaacatgattaaatcaatcccatattcttcaggaatgcgaatcgcaatttcttttttcggtgagccgacttccagaatcggggtgaccttcgttagcccatgattattcgcgtaacgaatattagccgctagttgctccttcacacgatctttttccatcgccgtcatcttggcatagacactagcgtccggtgaaacatagactgtacttggaataatgtgagccacataaagctcagcatcatttcttttcgcaacttcaacagcttccataaatgccttgttcgctaagtcagatccatcgaccccgactaaaattttcttatacgttgtaatcatttagcaacaccctcctattaatgaaatgaatgcgaatcctaactatatgttcatcatactgaacccaataggaccttgacaatttaactgcctaaacaaaagacatatcgttaatagctatagtaccgtcgatggtgcacgaattcgagttaaagaattggcatctctaaaaagcctaatatatactgaccctaagttaattaacgaaagcacttactagctatctcatgcactcatttctaaatcaatcaacttaaataataatttgaaaaagaaaggactgtcacatatggatattgtcataaccggtgggacatctgggattggcctatcgcattgccaaagatctcattgcagaaggccatcaagtcattatcattggacaggatgcggaaaaaggccgggcttctgtggcccaacttggaaaagcggccttttttatccaagccgatttagcgaccaaatcaggacgcaaccaagcactggcaagcatcaaatataaagtggataaaatacacgttctagtgcacactgccggtgttttccccagctcagcagaagaaaatattaaggctaatttagtcccccattatcagctaacaatgggcttagcagaccgattaactggcggtcgcgtccttatcgtaaccggtgatccgcaaatcattcaacaactcagcatttgcgaagaacaggagactactttacaacgcgcaaggtggttattaacccataaagctttattaaccctctttctcagttatcttctggccgaaaaagagattacggtcaattcatttttcccagggaatgtcacggatgagctaccgcattattcccaaacattgctgcatactgaagtgccagttggaaaatacttagcactccatcccgatctaacgcagagcaccggtaatttttttgataatgatcgcaacttggtgttactcaatgctcggcaatacaactatgataatgccgaaaagcatttgttacagtatttaacagagtaattgagactataaaatcgcttatcattagtggcaacatgagaatattattttccactaaactaaaaaaggacctgagacagtttttgtctcaggtccttacttatttgattgtataaaaaaaccccgcggatgcggggcacaaatattaaagtttaacgatgtttgttgcttgaggaccgcggtcgctgtcttcaacatcaaatgatactgcttggccttcgtctaatgacttgtaaccgtcaccttggatagctgagaagtgagcaaatacgtctttgccgtcttcaccagtgataaaaccaaaacctttgtctgcgttaaaccattttactgtgccgttgttcataataatttcctcctgatacatatcaatgtacgttttttgttgcaataaattattgataggtaaaagaggaaggtattgtgcatccaaaactcaaattacgtttcaaaatttgattacttgaacagtatagcatggcattttctaattagcaacccgcatcccaaaactatcgactaaatcgctcgcaattcattcgcaaaaggctattaaaataggctttaaagcgcataaactttttatttaaatatttaatttctaatcattttcgaaccgttttgtaaactttgcctcgctaagtgccatcaattcctcaggctcaatttcatatttcgaacagataatgagcagttggtcgaagcaatcggctaactcctcttttaagttagcttgcttttcaacgtcgtttttaacttttttccctgggtgatcacgcccaagttcaatcgttctaacggcccgtgacaattccccaagttcttcactcaagaagttcaaccgaattaatggtgaaaatcgataccaattccgttgttgataaaaatcaactaaccatgtttgatgcgcttttaaataatcttgcattttacattcactccatcattaaaaaaacacctaacctcgcaagcaatgtgcgaaattagatgtctccaagaattattgaatgtcacaggcgagattcgaactcgcgacctacggtttagaagaccgttgctctatccagctgagctactatgacctcattgattgacggtttttgctgtcagaataccgcataacatgctatattataagcaattgaagtagtcactgtcaattaaaattcgcagaaatgagggaaaaacatgcaattaaatcagtttgcacgcttaactaaatctcaatctgaacaaatcacggaattacagcgcattcatttactcccaaaggatttcacccagctccccttccaagtccttgcccaagatatttttcaacggctgttcccagaagcacatagtcaatcaacccagagcgggcaacttagtttattacaagccacaaccgaattaaatctaaccgcctaccttgaaaccattgatacttcattcgatcaagttgtcttctataatgtcgccctccaactcttgggttttgaaatgacaaccgattttgaacttgatcaacccactgcttttatgaccgccacaaaactcccatttatcgatcaagcggcatttgatcagaccgctttcatcgaagccctttatctcctattaacgacgcgtagccaaactgggttactttatctggatcaattggctaaccgtggtttttttgcagactggcaaagtgatcagccccaatttctcatcttcaatggtaaggtacaacccgttttcgataccagccatttaattcgagaagtcgtttatgttgaatcgagcctagatactgatcaagacggccaacgcgacttattagaaacgactatcttcagaccacgcgaaactgaagcgggcttaaaaattccggcactctacactgccagtccttactataaggggattaacgacgtcgatgctgatttgcacaatgttgatactacaattgcgactaaacccgttcaacaaccaaacttagctgatttaacccaaacgccaaccactgcaccgcttcctcaacctcgcgccgttaatggcacaagtatgacaactgaattaaacgcaacagatgacagcaattacagtttaaatgattactttctggcgcgcggatttgcgaacgtttacgctggcggcattggcacacgcggttccgacggcgtccggacttgtggctcacctgaagaaacagcttcaaccacggctatcatcgagtggttagccggtaatcgacgagctttcaccaaccgcaccgatggcattgaaattaaagcttggtggtgtaatcaccaagttgcaatgactggtaaatcctaccttggtactttagccactgctgctgcaacaactggcgttgaaggtctgagaaccattgtagctgaagccgccatttccagttggtacgattactaccgcgaaaatggcttagtggtcgccccaattgattgtcagggtgaagatgccgatgtcttagcgaagttgtgccaaacccgccaaaaagatgccgctgatcatgcgctctctggcactttcttcgccgaccaactcaaagccctgcaagaaggtcaagatcgcatcacaggcaattacaacgccttctgggcagcccgtaactatcgtgacaatctcgccaacctgaattgcgatgtcatcttagtccacggattaaatgattggaacgttaaactacaaaatgccggcgccttgtgggatttattgcgcgatcaaccggttaataagaagcttttcttacaccaaggtgaacatatctatatgaataacattcagtcgatcgatttcaccgatatgatgaacttatggttcacgcatcaattactcggcgttgagaatcaggctgtcacaaaattaccggctgttacaattcaagacaacgcacaagaagccacttggacgacccaggcggattggctagccctcgacaatccaactacgactttctggctaaacgaacaaacattaagcactaatgctaccgaaaatgccccactgacgacttttaaagatgacggtgttgcggcctttagagcccaaaaaatcagtacagccgcttggcaagatgccttaatcgcagatcaatcaagtttcactggcaaccggttgcgtttcttaggctccccgcttaccgaaccgctcattattgatggtcgaattcagtttagaacaagggtcgctgtcaatgccgaacgtgggctattgagcgtgctggttattgactatggtcaattcaaccgtttaggcaccacacctgctgtattagctgctaaaggccaacaactcggctatcagtggcgctatgatgatttaaaggaatttaagctcaatcgaccaagcaattatcaagtcatcactaaaggacacatcaatctccaaaatcgccacaatagttatcaaaccgacgcggtcaccccaaacgagttctatgatatcacgctcgacctacaacccacccattatgatttaacagcgggacatcaactcggtctgttagtctacgcgactgatatgggaatgacgatccgtgaagagcaagcattcgtttaccaagtcgacttggcagctagccaactgattgtcccccatctaaatgattaataaggagtctttttataatgtcaaatctcatcacctgtcgtcaaaccctctccatcagtaaccatcgcgtcttcgtcaatgatttgaacgaacatgaaacggtctatggcggacgcttgcttgaactcttggatggttcggcgtccatttcagctagccgcttagcgcgcgtcgaaaccgtcaccgccagcatcgaccaactgaacttcattgaaccattcaaaatgcaagattccttgtgcatcgaaagttacgttgccggtgtcggcacccgttccattgaaatctttactaagattatcggtgaacatctcaagaccggcgaacgattcctcgggctaactgccttcttaacctttgtcacaatggaaaaaggtccggcccttcctaacattcaacccgaatcaccggaagaacggttcatctgtgccggttatgaggaacgaaaagcccaccgtctcgcaaattttcaaagtcaaaaacatttcaatcaaaatatcagtaccgattatccatggaacggtcaataacgaacaaaagaggtgtcgattatcatcatcggcacctctttttatttatcttaaaagttaaacgtccggctccattcatgtgtgccacgatattggaatggttggcttttaaaacccgccatcccaaaactaacggtcattaaaataattcccacaagaatcatacataaactaatcttcaaccaatttttcaacatctacgccaccacctttaatcgactacggaacatcccaactagccagcgtgtgattccaaccgagaaacgaattaagtatttcgtcatgtaccaggtcgcccctgcacaaatcagccccacaccaaccatcacaaaactaattccaagctgcatcaccgcaattatccagccttcttgtaagccaacaaagaacgataaaactaagctgacactcccaccaagaatgccggcagcagcaaagattgcccccagaaacgggcctaaccaaatcaagaaataaccaagtgccactaatatgatggcggtcaataacaacgtgccccataacggtgaccctaagactaacaagatactgattaaaataatcaacatcggtgccatcttcttttggcgaaccggtttatctggtgtagctaattgcgctacaatctgagctggcgttgctaaactcgagataatctccgcttccgtttcacccgcttccagtcgatcatcgattaattcatcgtaataatcaatcgtgttggctgcatcactaatcccataccgcgttaattctgccgcaagctgtttaataaattgattcttagtcattgttacactcccttatgtaagtataaatgcccatcactgccggccaatcggccaaaaaactatcaatcgatgcttgtcccgccaatgttaaatggaaatatttacgcaagcgtccattatgttcgacccgataactttcaatttcaccctgcgcctcgagccgtttcaagattgggtataatgttgagtccgaaatttcaacgacactcgatgtatctttgataatttggtagccatatgaatcctctttcttaagcgttgctaacacacaaaattccaagaggcctttctttaattgtggattcaaaccgatcaccctttcgaaagttaatactatattatgcatagtattgtgtcaagcataaaaaaagaacgcccatcagttttacctgatgaccgttcttttgaaacgtttgataacagtcatatcccgactgttatcaaacccttaatctctgccgccgccaaaaatttggagcattgtgaggaataagttaacaaagtctaagtacaaggttaatgcgcccataacagctaaaccagaaaccgaaatttcaccagttgcgccgtattgacggtacatcatacttaacttttgattgtcccatgctgttaaaatgataaaaataattaacatagcgtatgacaagaagtagctaattgcagctgatgccatgaagaagttaaccaatgagacaataatcacaccgattaaccccatcattgcaaacttgccaaagccgcttaagttattctttgtcatgcgaccataaatcgacatggcaatgaacactaaagcacttgatgcgaaagctgccccaatttcaccaatgttatacaccagtaaaacggccgtaaacgtcaatccgttcaacgccgcatatgccacaaacatggctaacgaggccgttggattcttcattgaacgccgactaatctgaacgactaaaattaattctgcaatcatcaagccccaaaccatccacgagctaccacttgataggattgtgtaagtttgtgctttaaacacagtcaccattaaaacagcaatcagtgctgaaattccgacaccgacagccatcaaaccatacactttactgaaaaagcgggcttcgctgtcaacattcacaacgcgtctttcttccatgaatattcacctcttatatttctaaacgggcccataatcacccgattaggaatattgtaacaaatccatccagaaagacaatcaaaatgcctaaatcttaattatctttaggacttaaattactcaataattcttcgtaagcatattcgtatttttgcacatcaccagcgcccatgaagacaacgactggttggtcgaagtctaagagcggtgacatgttgtctaatttcaagacgcggccacctttagtgattttcgcacctaagtcagcacttgaaaccttccctgctttttcacgcactgaactaaagatatccgttaagaagacttcatccgcaaggtttaagctagcggcaaaatcatccattaacgcaattgtccgtgtgaacgtatggggttggaaaaccgctacaatttgtttgtctggatatttttgccgtgctgcatccaatgtggctttaatttctgatggatggtgcgcataatcatcaatgattgtcacgtcagcaactttcttttctgtaaagcggcgtttaacacccttgaagtctgccaattcgcgtgccacttctttgccatcaattttttctaaatgactgacagcaattacggctaaactgtttaagacattgtgttcaccgtaaagtgggacgtggtaatggccgatgttttcgccatgatagtaagcatcgaattctgaaccttgcaccgtccgttggatgttgcgggcttggaagtcatcgtcttcgcgtgtcccataataataaacgggcacattagctttgattttccgtaattcaggatcatcaccccaagcaaaaatccctttttgaactttgtaagcttctgattggaacgcgtcaaacacatcatctaagcctgtgtaataatcagggtgatcaaagtcgatattcgtcatgattaaataatctggtgaataagctaggaaatgacggcgatattcatccgcttcaaatgcgaagaattgcgcatctttaatccctttacctgtcccgtcaccgactaagtaactcgtcttagccacaccacttaaaacgtgagctaataagccactcgtacttgttttaccatgcgcaccggccacgccgatacttgtatagcctttcaataattcacctaagaattggtgataacgaacgactggcaagcccatttcaagggccgttttaatttcaatttggtcatcttggaaagcattcccggcaatcaccgttaagccttcgtgtaaattagtttctgagaatggcagaattttgattcctgctcgttctaaatcgcgttgtgtaaacgtatattgatcgatatctgagccttgtacttgatagcctaggtcgtttaaaacaagtgcaagagcactcattcctgaacctttaatcccaacaaaatggtaaactgtgtcatttgttatcatcttttaaacgtcctcttttcaataaatcacaattatctatatgattaaactaatcccttatagtttaccataatgcgggtttgagctaaataatgaatgtttatttttctctgttatcaattgattgatctctaaaacgcaaaaaaagcagccacaaaaattaattttgtggctgcacttaaacggattctataggtcacactctagcctaatgctaaataatcttcgacattttggaagtagactttataccatgttaagaaggtaaagatggtccagatcttccgacggccgttaatgcgttgttctttattggcatctaacaaggccaataacttatcttgatcaaagaattctgcaacgaaatcttcgctaaagagtgctttgactttttcataatacttgtcatcttctaaccattgcttaattggcactgggaaacctaacttaggacggttggcccaagctgttggcaaatgtttagcagaagcttgacgataagcgtatttcgtatcatgactattaattaagtatttagttgggacttcaccagcggccttagccaccttaggatccaggaacggcacgcgtaattctaagctgtgcgccattgaaatcttatcagccttttgcaaaatatcgtttaacatgaagtgatgtaagtcgatatattgcatttgtgagactggatcagcatccgcaacgttatcaaaatcagcttgatagtttgcttgaatcgttccatcattttgataagcaggtttcaagaaagtattggcttcatctgccccaaaaatacttggattttcgatatcaaaaatcacagattgacccgtatagaattcacgcgggttcgccaaattcgtgtataaatggacgcgacctgggaaggctggcatcttcttaacggctttggctaaactggcacgcgcacccttaggtaatttcttcaagccagaagtgaaggccttaattgttgaattgtgggagtgcatgccgtagttgacatacccagcgaataattcgtcggccccttcaccagataaggcaaccgttactttttcacgggcaaagcgtgacaagaaccataatggcacacatgatgggttcccatctggttcgtccaagtaatattggattttgtcaaattcagcaaacgcatcatcggcattcactttggtttcattgaagttcaagcctaattcatcggcaagcgcccgggctgctgtgacttcattataggtttgatcatcaaacccaacactgaagacttcttgcggttgcaaaatacttgtgacataactactgtcgaccccttctgataagaaagctccaactggtacgtcagccacattatgggctttaacggattcttcgactgcagcatcaatcttagccacttcttcttcgaaagataagtttgaaggattaaatgacatatcccaatatttttcgatgtccaattggccatcttgataagtgaaataatggcctgctgggaatctgaaaacacccttgaagaacgtttcttgtaaatcattgtattgattcatcatgaatgattttaaggctgtcttatttagttctggtttaaattctggatggcgcatgaaagttttaatttcactactgaacatgaaagtcccatctgctaaagtcgtgtaataaaggggcttaatgccgaagaaatcacgagcaccaaataattgcttagtttgtaagtcatagatgacaaagacaaacatcccacgcaattttgtaacaacctctttaccccattcttcgtaagcatgcaaaatggtttcagtatctgaatctgttttaaagtcgtgaccaagtgcgatcaattcagtccgcatttcacgataattataaatttcaccattgaaaaagactagcttagtgtggtcttcattataaatgggttgatcaccctttgctaaatcaatgattgataaacgccgaaagcctaatgcgactttatcatcgataaaatcaccatcaccacttggtccacggtgtttaatgacgtccatttgttggttcaatacttcttttttctttggtaaatcaaataatccaccagcaaatccgacaatcccacacatatgtttaacccctcttttgtgttttactgcttaattgactgcaaaacgaaataacaattaaagggtttgtctttaaccaattaattgctatctattatcatactattttaattttaataatcccataacaaaatcgtaagatggattattttagtagggctgcgactgcatctgctgtcacttcacgaccgacttcccaatcatctggcaagaccataatccctttagcaggagcaccagcaaccccgatttcacgggctgcacagatcatgccgtcactttgaacaccgcggagttgaccaggccagataattttaccttctggcatgacagcgcccaccgtcgccacaatcactttttgtccttgtgcgatattagcagcgccacaaacgatttgaacggtttgatcaggtgcaatctgtgtttgagtaacgtgcatatggtctgaatcaggatgcacatcacattcttggacataaccaacgacaatgtgtggtgtttcatcagccactaaatcaccggtgaaaccagctgctacaagtgcttcatttaaaacagcaacttgctgttcagttagtgtttgaacaccgttgaattgtaaatcgggcaataactcattcaccgctaagaaattatagccgatggtttgatctgcctgatcactaatccgtacgattgattgtttttcagttatcacttgcttttcaacatcaggttgggtcattaccactaagatgttgggaaaagccgcttggttcatacttgcaattaacatttaatgactccttcaaggttagttcaatgaatgaataaatccagtaatttcgcgttttgttttccgatctttattgacaaaacggccgatttctttaccgttatcaatcacaacaaagctaggaatcccaaagatttcccattcttcacaaatatcgataaattggtcccgatcgatttcaataaagtcgtattccgggaattcagcttcaatttctggcatggctggtttaataaaccgacaatcactacaccaagttgctgtaaaaaataaaacatgtttcccttcagtaatcagatgagtcagattcgtatctgtcatcgctgctaattctttcattatgcaccccttcaattttactactcgttttaatataagcggtttgtccgtaaatgtccactccttaggaccaaaaattatgctatactatttaaagacaaaaacgactgaggagtttttctttgaaaaaaaatgggcaaacgtttaaatatttattaaccggcatcggttttgcgctggcggcggctgccagtgcgaagcaatatcgggcgcaacaaagaatgatcaaattaaaccaaattttagaagatgttaaagccggcttaaaacatgaaggccagattgtgggttcttggattgaagaaagtccccacttattctcacaaaacaaacggacctttccagtctatcaaggtggcatcatctgcgagcgtgaagatggtacaaaccaatttcgattcaaggtagacgcaagaaccggcgtcgtgattgaattctcacaaatttagagtgcgcagcgcggtgggcacgttctgaggattagcttagtcagacgagtgaccaatttattggtcgcttgactgacgttgctaaccgcaggaacataccgcgcggagcacgtttcaaccaatattataattaaaaaggtacgctatcctagataaaatctggataacgtacctttttgagttgaaacgtgctttatcacactgtcttttccggttagctacagaaaggaatcgatggtaaagaacccccatcaatccctttcttaggctaatcctcaaaggcaacccgtgtgataaaaacactcttgctgaaacgtgctattgacgctagatttctgcgcctaactacacctgtcaaattagcgattatatcactcattcgccagcctatgttaatgctcaaaatctgaccgagcgtcaagtgcactcttatctaaaacgtgctttcaaagctagcaccctgtgcatagctacgtccggcaaacaaccaattgcattggttattcaccagactaggctattgctcgggtgctgaccagctttgaaagcactctacttgtagtgtgcctctaatctgtaaatcacttggccgcgcttgctgaatttttcttcgtattccgtttggatgttgtcttctgcaagttcactattgtgtaaatcgagtgagatgtcgtcaaaaaccatcccataatcattcaggctcatcaatgagtattcgaatagaccttggttatcagtcttgaaacgtaagtagcccgttggttgcataatttgttggtattccgctaagaatgacttatatgtcaatcggcgcttttcatggcgcgtcttaggccatggatcagagaagtttaagtacacccctgccacttcgttttcagcaaagaaagttgttaaggctgcgccgttacccaataataattggagatttggcaatttcaattcaacttgtttttgtaaaatgacggcaatcgctgattcttggatttcaactgcgataaagttccggtctggatatttttgtgccatctgagtgataaattggcccttacctgaacccacttcgatgtaaatgggttgttctttggcaaaacgtgtttgccacttgccggcgatatcttccggactcactaaaatcatgctggggttggccgcaattaagtccgccgcccaaggtttatttcttaaacgcattatgttctccttgttgatgccaatcaaaaaggttggacacttgcccaacctttggcatttaatttttattaattatttcagaaatcactgcttctaagcgcaatatgtcacggttcatttcagtaaaacgaccacgttgataatggtgcttaatgctttggagtaggttcaaactgccgtaccagttgacgcgcatcattaattcaggcgtcacctctaggccgtagttctcaagccactcgtgccattcttgacgtggaacatattgaaataaaatcattccgaaatcgactgcagggtcggctaacattgccgagtcccaatccactaagtagagtcgattaatatccgataacaaccaattcttatggcttaaatcgccatggcacacctctgcagaaggtgcttgtaattgacgtaacgtttgcttcaaataatcagctgtttgttctaaaaatgggtgttgccgtaaatcttgcggtaagtcgtaaaaataggcttgcaacatttcgtttgctgaccagacacgaccgccaactttttgtaacattcgtttcaatagttgggattgatgcacccgtgctaataacttagcgacttgtgggctattcatctcatcacgtttcaaggttcggccgttgagccactcttgtgcggttaagacatccccactcgaaatccgcttcgtccagattaagcgtggtgttatgccttctgccgagagcgccgctaaaaatggtgatgtgttgcgctttaggaaaatcttttctgacgcgcgaacgcctaaaaatgcagcgcccgtatcaccaccggccggacgaacttgccagccagtatccaggtcaaaattcatcagcctcgactcctcttcaataaaataaagcgccaaaatacagcgctcacgttgcttcaactgtctaataactaagggtatcatataataattagccagtagtcgtcaagtaggaaagcatgcgtgtcacagggactatgcccccaaccgtttaggcaaatagaattgaacaaagccaatcacgagcacgaacaatgctaaaacacttaaaccaacttgaatcgtcatccctagtgtcactaataaaatgacactaaagagtaacgcctgaagcaataataaagtccgcattaattggctgaacgcttgaattcgtttggtcgttggtactgggtatagatgagtgaaaataatttgatcatactgattgtaaaacggtaataattgaaaaccaactagataaatcaatagaagtccgagtgccaaactcaaccaccatatgtgactgaagcacagaatgatgccccctaaaacaactaaccggatatataacccgctgaattctgtgccccgcaaaaagccacgcgcatataaatagaggtaagtattggctggtttagctgtaattagctttaataagccatctaaatagcgacgacgcttaacctgactactgagccctggcacatccgtgaagaggttatagaggcggtaaattcgtcccattcgtgaatcttctgcaccaactgccgctaaccaatcgaataactgtgtcttttgaacacgcgccaattgttgtcgctgataataggctagtccaagcgctacaagcactccgactaaatttagccactgatataattgactggcaattattgccaaatcaaggattaacgaaagcccttttgttgcctgggtttcatccgcttggtaccactgacgcaactggattgaaaagcggcggtctttgatgattaccaatgtaatcaaggcaacggctatgtgccatgccgggaccgtcttagtaattaacaagagtggcgccactagaagcgtcacaaaagccattgcaattaatggtaaccagctactatataaacgtgctgatttcaaatacgtcacaaggccactttcttttggcaataagaagacactatccgcttcttttaataatgttgctaggcgaccaaaactaactgccgcaagtaatactaaactcaatacaggttttagccaccaagcttgtggatccagtcctttgacggcgttagcatatgtgtagcccaacgctcctaataaaaagataatcgcaatcacgaaatgatcattgaaaacgaggcgcaaatacttcacttgttcttgaatatgtttttgcacgcgtttttgccataatgcttgcatggttaaccttctttcgtcatctgcagataaatatcgtcgagatcggcgtcagccatgttaaattcaacctttaattcttcaagcgtgccagtcgttcgtacgcgaccctgatttaaaagcacaaatgaatcagcatattgttgcgccgttgcgagaatatgggtcgacattagaattgcagctccttgtgcttttttttcagcaatgatttctaataaatcatgaattgccaatggatccaatccagtaaaaggttcatcgatgataaacaagtcagcattcgtcataaatgcattgacgatcattactttttgccgcatcccttttgaaaagtgaaccgggaaccagtctaacttattgtctaatcggaatcgttttaacaatgcattggctttaacccacgtctcttcaacgtttaaatcataagccatcattgttaattctaaatgctcctttaaagtcaattcagggtataagacaggcgtttctggcacataggctactttttggcggtattggtcaggattcgactgtaacgtcacaccgtctaaagtaattgtgcctttttgtggtgtcaataatccaatgatgtgtttaatagttgttgatttgccggccccatttaaaccgattaaaccaaccacttgattgtttggcacagtaaagctgacctcttttaaaacggggacgtgcgcgtagccccccgttaattggttaatctctaaactcataatcaatagcctcgttttttggtttttaaaactacttttttagtgaatcctttttcatatcatatcttaacacgaagtaaactgcgagtgtatgcccccactcaatatttttccatccgcttacaaagctgatggcagtagcgaaaagcccttgtttatgatagcattaagctgtattgagacttcaaataagagaaagtaggcataattaatggatgattgtatcttttgcaaaatcgttcgaaatgaaattccgaacacagtggtctatgaagacgacgatgtcaaagccttcttggacatcacacaagtgacacccggtcataccttgttggtacccaaaaaacacgtggcggacatctttgaatacgatgctgatttagctgcggccgttttcagtcgcattccaaagattgctaaggctattaaagctagcaatccagccatccaaggaatgaacatctgcaataataacggtgcggtggcttatcaatccgtttttcattctcatattcatcttattccacgttacacagcggatgattcatttgcaatgcaattcggtgataatagcgctgattacactgctgaccaactacaagcgatcgcagatggtattcacgcacaattggaggactaatcatgtcattttcagaaggattactagttggtggcttattagggacggcttatgcccttctcaccgcttctacaaccggccccaaacgacaacaagcgattgcccgctatttaaacgagctctcagaaagttcaactgatgttcaacaaagtgctgttcaattgcaaacagcttcgcaaaatttatcaaacgaactcaaaacaactgcagttacatcacttggtggtatcagtgatgcattgcaaacattttcatttgaagcagcaccacgaattgctcaaatcgaagaatcagttgatcgtttgacacaaaacttaaaaaaataaattcaccaaaaattagattgtatgcaagcgataaggttaagcatatcaacgattcccgcgtttttagcgtaaaacctaaatttgaaagttctgtgaagttttagacgcttcgttcaatttagttagtttatgtgttatattaattggtgaattcactacgaatttattcataaatattttgataaggatgtgtcatacaatgaagaaatggctattagccgctgctagtttattaatggtagtttcactagcaggttgtggtagcaagactatcgcaagcctaaagggtggtaaaatcactcaagacgaatactataaagaaatcaaggaaacatctgccggcaagcaacaattgcaacaaatgatcttgcaaaaagcgcttgaaaaccaatacggctcaaaagccatcgataaaaaagttaagaaaacttatgatggttacaaaaaacaatacggttcatcattcaactctgtgcttgcacaaagcagtatgacacctacatcatttaagaacagcatcaaaacacaatacttaacacaagcagcactaaaagataacaaaaaagtaaccaatgctgacttgaagaaacaatggaaatcatacgaaccaaaagtccaagttcaacatatcttagttgaaaagaaagaaacagctcaagaagtcattgatgcacttgcaaaagacaactcaacaaagaacttcaacgaattagctaagaaatattcaactgatactggtacgaagaaagatggcggtaaattacctgtcttcgatagtactgatacatcacttgactcaacattcaagactgctgctttcaaattaaagacaaacgaatatacaacaacccctgttaagacaacttatggttaccacgttatccggatgatcaagaaccctggtaaaggtaagatggctgatcacaaaaaagaattaacagacatcgtttacgcttcatggcttaaagaccaaacagtgatgaacaaagtcatcactaaggtacttaagaacgctaacgtatctatcaaggacaaagatttatcagacatcctttcaagctacggcgttaacagcaaagcttcaaaatcatcatctaaataagcattaacaaaaagaaccccgctgcgacagcagcggggttctttttgtacatttattctgttggttgatctaaattaggatcttcgactgggcgatagaaacgccgcccatccattgcgaagagccgttcagtaaactgacctgcttccgcatgttgtaatgactgggtcatcatcgtgatacttgcatctaattcatcaatttgatgcagaacttctgcttcaagaacttgtggccggacaggtgaaccatattccattaaaccatgatgggccaagataacatgccgcaatagcaacatatcctcagcattcacgtcgatctttaatgtatcacaagcccgcactatctcttcatcaaccagtacaatatgaccgatcaaattgccacgaaccgtgtattccgttgaaataggaccggacaattctagcgtcttacctaaatcatgcaagataacaccagcatatagcaatgcctcatcaatttgtggatattgggcagcaatcgtcttagctaagcgcaacattgaaagtgtatgataggccaagccgccactaaacgcgtggtggttggtcttagccgctggaaaactgaagaattccgcttgatgtttttgcattaaatgtcgaaccaaacgttgccaatttgggtttgtaatttcgaataacatcgcgccaaattcgtcttgcatctcggttacttgcaccggtgctttaggaataaactggtcaactgtttgcggttcgtcccccgtcgttaagcgcagtttataaatcttaacttgcggattattttggtataattcccgcttaccttgtaaatggatcacctgacccgccgtaaatttagcaacgtcttcatcagaagcatcccagtatttaccgccgatttgtcccgattgatcttggaacgtaaacgcgatgaattgcttgccgtttttagcaatccgcacgtccgccgttttaattagtacaaataaatccagattctcgtcgttttggtaatcaaataatttctttgctgtcatgtgtcagccccacttcctctagatttaaccaatgatccgcttcaaagtgtgcttgcgtccgcggattggccgttaaataaatcacttggttggccgcactaagtcgttggagtaatgtccaaacggcgatttggcgttgatcatcaaagttgacgaatccatcatccaccaataaaggtaatgagactacgtcagctacctcttctgcaaacgcaaagcgtagcgcaatgtataactgctctgcagtcccctgtgataattcaccgacttcaaaaagcacttgatccgcccgtaaaaccgtcatcagtgtgtcatcgaagttaatcttaatataccgattctgggttagaattgcaaaatactgcgttgccttttccaataaacgggggaaccgttcttgtgaagcggccttcagcgtcgcttgaatccaatcaattgctaactgcttagcgagccactcttgggctaaatcagtaatcttagcctgttcttgtaattgtcgctgtcgctgttgttgataactgtcattatcgacaagttgcgcttgcgtcacgcgtagttgcgcaacagcttgttgctgttcttgtaactgacttgtcaaacttgccacttgttctgtaatttgagcggcttgttgcttaagctgttcttgactagcgattgcttgtaaagccgacaagtccgttgccaattcgcgttttaaatcagcttgacgttgttcattagcacggcgctgttgctcattagcaacacaactggctaattctgcggcggttgttaagttagcctttgctagtaatgctgtttgtgcagcgtcttgttctttaatcgtgtctgttaagcgtgtcacttgttgttgataataccggtaactctcgttgctttgtgcaaggtcttgtgtgagttgggtaatccgggctttgaattggctcacctgggacaagttctcttcatgactgccctgtaacgcccccacccaatcacgggcaaaagcaaacgcatcccaatacatatttagtgccgcttcgattgcttgattttcggcttgttgttgtttgagcgccatggtcaattgagtcatccggcttaaagcatgctgcatcgctaaaacttgactgattggcatcgccgtttcgtagccagtttgcgccaataataccgcgctttgttcgtgcatcgtctgcaatattgcttgttgtgcttgtaaggcagctgtcttggtttgcttttcagcctgcaacacatccaacttagcgagcgcttgttgccaagcttgtttttgcactggttggtcatggtcagattgtttattttgccacatcatgtaaccaccatagccaagtgcggctagtccaacgaccgcaatgactttcagagcgcccggcaagaaaagaccaatcatgaatatgactacgccaatcagcatactcaattgactggcacgtccatcagtcgttggcgtttcttgtggttcaacctgactaactgccgcgttttgcgtggctaattgcgcctctaaatcagccagttgcttggtcagcacttgactggtcgtggttgccccattcatttcagcttcggcttgttctagttgtgcgcgttgctcatctgtcaaaggatttggtagttgatccgtttgccattgatactgcgctgctaattgggctttttcgctagcgagttgtgcgctttggttttgccgtaatccaagtaattgaatttgtttttgctgttcatttaattgttcaaacaatggcaccaacgtctcttgattagcttgataaaatcgaaattcacctgtttgatccaatgtttcttgaacagttgctacctcggattttgcttctgctaacgcctttgcattgcgttctcgttcgaccactaatgcttggtattgttcgtcaatcgttaagtcaaacggcgttgccttttcaagtttagtttgaagtgcttgccattccgcataacttggccaacgatcaagcaaatgttgcaactgcgcttggcgttgttttaattcagccacttgcttttggtgttccgtcatcgtcgcaacggtactctgcaatagacgtgcgttcgtttcatattcttgataaccacgactagcttcgttaacggattgcactaactctggataattcttcaaagcaacattcaatggccacttacgcccagagggtttgaaaattttctgactgtccttatccagttccttggcaaagtcgagccactcatgactccccaccgcaccaatcgtcaataaatgctgcaaaaaatcagcctgttttagattaaatatctgatttaaatcctgttggttcgtttcaaaaatctgcgtaaacaaagcttcatccgctggtgccaagaggtcagctaagtaatcagcgccaaattcttggccttgatcgatgaccgttacgtcgcccccaaacttaccggaaagccgccgaatcacaatatcgcgatcatgatagctaaccagtaattcaccaccgtattgcgcgccgtttttgggcacatattgttcataccgttgtttagcggtcgcaaagccgaataacacgcctttaataaaggctgtaagggttgtcttccccgcctcgttttgaccataaaggacttgatagtcggtattcaaatcaatcgtctgatcatgccacttaccgaagcccaaaatggtgactgtcttaattcgcatggctaatcccccatcttcttctcttgtagaattgtcgtgactaagtccttgagatccgcttgaaattctggtgtttcaattgcttcccggataaagttttccttcattaacggctttgctttttccagaatattgtccggtgtcaagatagctgcagccgcttggtcccagtaggcttggtcaatctgactaaattgctgttgtgctgcaaaccgcaacttcaacgcgtatggccaatgcagtggttcactattttccaattggtcttgtaagactgccaataattcaccattattaatccgttgcaataaatcactcgataatcgctccgcgtgtgttagctctagcgccactaaactagcatgatcactttgcatcaattgggcactcaaagccgtttgcaattgagttaagctcatgtcaggtgtcacctcaaactgttgacgttgccactcaatgaccgtcgttggtttgaacgttaaatcgaactgaccatctttggtgtccactaaataaaagcctttttcaccaggttcattcttatgccgcccttgtaagttccccgggtaaacaatcgctggtcgttcttggagaatctggcgcttatgaatgtgacctaatgcccaataatcgtaatggcaagcgttcaattcactaatcgtaaatggtgcgtagtgatctgtatcggccgttgctttttgactaccgtgcaacgtcccaatcgtgtaagttgtgctggcacgttgtggaaaatcaaccactcgatcagctgacaaccaccgttgatcataactgaaccctacaatggtcacactctcatgtcctttggtagtcagttcaaacgactctacttgtgctccaaaaacatggacattggcgggcaattcaaaatgcacttgattggcatcccagtaatcatgattcccgtaactcagatagaccggaatgtcgacatctgccaaacgttcaaattgttgttttaaaaatttctgaactggcaaactctgcgcttcttgatcaaatgaatcaccaactaataatacaaaatcgacggcttcatcgatggctgtctgaattaattttttaaacgccgtgaaagttgacgcatggattgtttcccacaatgctgtcggtgcttgttttaatccgacaaacggactgtcgatatgggcgtcagctgcatggataaatttcatcttgaaaaaccccattcttttggccggtcgtaaccagcttagataagcttcattataccattgccacgcggtgtgataaaggcgatcagaacaaacgttctgtttttaggcaataaaaaagcggtgaatcgaaatcaatcgattcaccgtttgaaacgtgcttctggttgcaacaacttccgcttaatttaaaaatcgcgttaatcctagaacctggattaacgcgatttttgtattaatgctcagttgctgaccgcaatcagtcacactcttatttgaaacgtgctttttgaaactgacttttccagttaactacaaaataagactgatgacaaaatacgccatcagtctcatttttaggttaatcctcaaagccaaacccgtttcaaacgcattctatgcttggtagatatctgcgattggttttgagatgatttggtttaattcatccattgtttggcttaattgacgttcttgttccatcaagttcttgattgcgtcgatgtccccaattttttgagcaagttcttggatttctttaatttcgtcgtccgttaattcttgaccttgcatttgtttttgttgaagtgtcatttgttgcgtttggaatttcttaaacattgtgaaggcaatatcgtcttttttcaatgctgcaaaggcattttgtaagcctaaaaattgtggtaattcttgcaagtgcgttgccatttggttggcatcatcataaatattaactgtcattgtactgactcctttttccatgtatttaattgaaaaaacctttcaaattattataccattgattggctgtatctttcgctttatttatcccatctttaaaacccgattcaattgaatcgactaattcgttcgatgtcccactctgttcttttttcgccaacgattgagcatcttcagtatcaaagtccgtctgtgctgtggttggtaagagttgttgcatctcatatttaaagattggtgctaaaccgtcaatgctagtgttcttcataaagtgatcttgatccgtcttgtcataccccatccaagtcgcaacaacaatatccggcgtataaccgactaaccattgatctttggtcccaaagccataactatcaggcacttcagtactaccagacttccctgcgacttgatagccgttgggtttcgcataacgcccagtcccattattataaacgcccaacatcatgctagtcatttctttggctgttttttggctcataatccgtgtcttggatggttcggtattatcaacaatcacggcgccactcgcatcaacaatcttccgaataaaatgtgtttcagacaattcaccgttattcgcaaaagccgtataagcactggccatttggtaaggtgaaaccccaccttgccaaccacctagagccatcgccaagttttggtcactcttgggtactgaaatgccgaatttttcgaccgacttaatgccgcgtttgaggccgatttgatttaataaccaaaccgccggcgcatttgtactgttggctagcgcctgatacattggcatcgatccggtataaacgttatccgggttcgttggtgtatagtggttagtcccatagctttgcttcttatcttcaagtgatgaatcatagtggtagccatcttctaaggctggcgtataaaccgccaatggcttgatggttgatcccggttgacgcttcatctgtgtaatgcggctataaccacggattgtatactcaccacgaccaccaacgacggctgataccccgccggttttcggatcaattgcaactgaactaccttgaactaaggtgtcatccgcagcgttatcagggaacaaccaattttgtttaaaggtggtttccatcttactttgttgggattggtcgagggcagtatagatcttgtatccgttcttaacgaggtcttcttctttcaacccaaagcggttaatggcttcattcacaacctcatcaaagtaatacggataacgatacccatccgactgctcgtaggtattcgtcacgacaagttgctctttcttagcagcgtcggcttgtgcttgcgtcaacttgttattatcgaccatcaagccgagaattaagttccgccgcgcagtcgcattatctaaatggtcagccggattatagaaactagggctccgcaacatcgctgcaatcacggcgccttcactagcatctaattcactcgcattcttaccaaaataccgttttgacgcatcctgaacgccccacaccccgttaccgaagtaggcattattcaaatacatcgctaagatatcctgtttggaatagaccttggtaatctgaacagctaagaataattcctcaaacttccgcgagaacgtctgcttctgactcaacttggcattcttggcgagttgttgggtaatcgtactcccaccaccggtaatctgcccatgatgaatcactaacccaactgctgctcgtgctagccctttaatactgaatccatgattggtataaaaggtccgatcttcagtcgacaaaacagcattttgaatctgcggcgatatcttatcaagatcgacataagtccctttttgcgaatataacgtccccgcgcgttcatccttaatgtcataaagcgccgttggggtttgtaagttggccttaatctcaccgacgttagccgtcttcgctttaaacgtgagccagctgctcatcgcgaaaatgagaattaaaacagcgagaatcagccatctcgtcaattgtagtcgataccagacataatgaatcacgcgccagacgcgtttcataaattgtttaatcgccaaccaaaacggcgaagcttgcttgttcatgcgatccctcttcttacggtcaaaattaatcttgtttaattgtagcatattcgtcaattgacactgatgccaatcgaagacattaacaatcttttaaaatttacttttacaccaattttcgctaaactaatagcttaaaggtggttgaactctaatgataatttaccaaaaaaaagtgactttagcgcccgactttagtccgatgtctgtccgcggcctgctgaatcactggttagtgccgcaaaaaatgcaacatttcttgcggattaatcaagatattttggtcaacggacattatctcgccttcaaccgacacgttgaagctggcgatcaaattacgatgaacttctcagaagtttccgttaaggtccaagactacgaacttgatgaacggcaatctttttccgttttatacgaagatgatgatttactggtcgtcaataaaccggcggggattaaaacccatccgaacggtcctggtgaaaacttcaccctaatgaaccaagtggcggcctatcttgctaaacaagataaaaaggcctacatggtccaccgcatcgatcaagcaaccagtggcgtgctcttgattggtaaaaccccaatcgtcatcggcattttaaaccgacagcttagtcaaaaaacaatgtcgcgccaatacatcgctattgctaacgatccggaacaaacactcttggaacatgcaacgattaacctcccaattggtgtcgatccatacaataagcgcaaacgcacgattgattacatcacaggtttatccgcagtgacccattaccaattactgcatcgaaaaggacctgcagcaaccttggcagtcaacctcgaaacagggcgaacacatcaaattcgcttgcacctggcggctgatggtcatcccattttgggtgatccgttgtactttccaaccgattcaacacagcgcctactactccacgggcaaacgttgcgctacacagagcccttcacggatgaacaaagaacagtaacagcccccatcccagacatttttaaccagtatgtagattaaagagtgagttatcagccggatatctcctgaggattaacacagaacatgtttagctcaacaaaataaggcgttgcgacaaaaaattacttttgtcgcaacgccttatttgtttgcttatctcgctgttgctagatgttgtgcgaaacgttcgtttaattcggctgctagttcctcactagggctaatgataacaatcgtatcgtgacccgccagcgtcccgacaacttctgggtaccccaaatcatcgattaaggctgctaataaattcccgttacttgggagcgtcttaattacgtttaacatttgcacttgtgtaatggacaaagccacttcacgcagtttatcttttaatttctgagtttgggtgcgttcgtcatcgtgaaaaatcgtatagcggagctcaccgttcacatcccgtgccttaacgatttgcatctcccgaatatcacgtgaaatggtcgcttgcgttgcatcaatcccatcttgtttcaacgttgctaataaatcctcttgcgtcgaaacaacttgctgattaatgatttgttcgattcgtgcttggcgatctccttttttcacgactgccacccctttttaccttaattggctctattataccagtttttatcaaaattcgatagacagcgctttatataattcaaaaaagcgcatgttcataacttttttacccacaaaaaaagagcgccgattactcgtgtgcccttttaagattaagctttccgtgcttttcgtaccttaaatgtggttaaaattgcgaccgcaacagcaacccctgccaaaattgagaggaagaacaaaccaatattattggttgcccctaacaccccaacgattgggccaccatgtggcactgcatcggtgattttgaagaccatcccgactgcactagcaactgctgaaccagcaatgatacttgggaaaacttgttttgggttagctgttgcaaatggaatggcgccttcagtaatcccaatcaagcccattaagatagctggaatcccagctgatttttcttcttctgtataaagatcgcgacgaacaaatgttgcaatccccaatgccaatggtggaacagcaacggcacaagcaacagcacccatgatttatggatgtccagccgtaatcgatgccaccccgaataagaaggccactttattaactgggccacccatatcaatcgcgaccatcgcaccaatcacaacgccaagaatcacacccgtttctggattttgtgaaagggccgttaacatatcttgtagtgccgtcatcaaccataaaataggtgcgcctaaaacgagaattaaaacggctgagataatcccaacccctaataacggaatgacaaaaattggcatcactggccgtaaatcttttggtacgggccatgaattaaaccatttaaccaagtaaccagccgcaaaaccaacgataatcgcaccaataaatccagtcccggcttttgtaccaaggatgtctgtattgttggcgaccattgcaccgatcattgcgggtgctaaagctgcacgccccgaaatagcataagcgatataaccagcgagaattggaatcattaaggtaaaaccaatcgtcccaatctgattcatactactccaaatggtatgtggtggaatcaccattcctgctttagtcggatgcccaccaatcgcgattgacaaggcaataaacaacccaccgacaacgacaaacggaatcatatgggaaaccccatttaataattgcttaataattggactttgttcatgaccgtcctcttgtttagcttctattttcggctgattcttgccataaatgcctgccgttagtgctttttcaatcagtgtatcagaatctttaatagcttcagcggtcttcgcatatagtactggcttgccattaaaccgttcttccccatcaacggcaacgtcagcggcaataatcacgaaatcggcatcagccacatctgcggcgcttaattcatcctctacccctgaagcgccttgtgtttcaatcttaacttcatatccgcgagcttgcccggctttttgcagtttttcagctgccatataagtatgggcaatcccaactggacattttgtaatcccaacaaactttttcatcttctaaatcctcctagttaaattcgatttcatcgttaactaacgtgtagagtgccattgcatcatgccgattttgcttcaaattatgaataaaagcgtcatccatcaacttgcgcgcaaacttcgacaacacttttaaatgcgtcttattagggtcatcgagcggcataattagggcaatcgcgatttcaactggtgcgtcatctaatgcttcccaatcaacaccagtttcaaacgtgacaattctgacaactggttgagttaatcccgccactttcgcgtgtggaatcgccaccccattcccaaaaccagttgtgctctcagcttcacgcgcattgaatcccgcggttaatgcaacccgatctaacccattcttatcagcaaataattgcgctagtgttgctaatgccgtcggtttatcatccccaacaacgatatctgtaaaaatattttcaacatcaaattctttcatctggtaacactccattctaatttttctgattcaattgtgccaagatggcgagggcagccgtcccatcagatgcttgtgcgacttgctttaaaagacggggggtttcaatcaattggtctaaatcatgataaatcgcccgcatttggccatgaacagtttcgttcaaggccataaagaagacgagctgcactttgtcgttgtgttgccaattaatactttggggtgcaatcagcaacccaatggctggcttggtaattaattgtgaatccgcatgcggcaaagctactcgaccaagtgccgtacttgctaaaacttctcgggccaacgctgcctggacaaccgttggctttgcatacccttgatcaatgagccgctgacaaattaattcaattgcgccttgatccgttaactgctcttgcgtgacaattgtcagttcgggttgcaataaagctactaagtgattggtaggcgtcggttgttcagtaatcatctggcgaatgattccaatatcatgccgatttaacaaaggactgacttcaatcaccggcactgacaaacctttaatcgcaatcgtactgatgactagagattccttaatcggggttgcaagtagttctcccaaggcaataatacgagtaatccgtaattcttgagcaaacgttttggccaaccgttgccctaataattgcgatgtcccaatgccactactacaaaccaccacaacactcaagcgtgcatcttctgaatgtcgttcaaaaaaaacttcaaagtgtaaactagtaaaggctaattcgtcctcattcatttgaatctgatactgattttcaagcaccggctttagtaatactgcttgatcaaaggcttgcggaaaattctggcgaatttcatcagtatatgggttattaatactcaatcccattgcaagccggcgaagtgccgaacttaaatgaaccgccaacccctgaattaattcctcatcaactgctaattgagcaagctgttgccgtaatagttgtggcgcccgactgattgccgcaactcggtctggatagtttgaacagatgtatccttcgattggaccgttactaaatgacggttgaggtatccctgctcaaaatccggaattgtcaattcaaatcgccgttctaaaatctgtactaacagctgtgtttcggcaatgaacggtgtcaccactggttgggctccattgcttccaccagttggtgctggcatcatcagatgaatcgctaacgactgaaactcgtaatcagtaaatgatagcgtacttttttcaattaattccgctaaagctgtgagtatgtttttaatcaaggctggttcaaacagttgattcagattatccggtaattgaacatggcgcactaactgtccatttaactctttagcctcagtccgttttccccaatactgactgattaactccaccgttgcttgccgcttttgatgctcagaaccgattaaggataaaccggtatgcgtgattgccaattgaagaccgaattgcgcgagtttttgctttacctttttcaaatcattctcgactgtactccgactcacgtatagggtattagaaagttgttgaatcgtaatcgatgctgaacctaataataatttagccagaatgcaatgacagcgttcttccttggattggggacgatcattggcctttttttcaagatgattggctaatgtcgcgacatccccggtaaaataaataccgtcattcggttttcgaacgagtttcacattaaagggctctttcgatatcattcaaggtggttgcaatggtgcgctctgaaagctgtaactgtgcggcaatgtcgacatagtacgttttatgctgggccaaactatattgaataatagcgtgttctcgtttgttcatgcttatcgcaactcctcgtttcaatccctctacgctatctatagtctaatgtttatgtatccgcttgcaaacgtaattatttgcaagattattctggtaattattgcgcaatgctccataagcttttcttaatcaaccggttatgctggggattgtttatttagttgctagcctaatccaatccattaccttatccggtcaatttatcgcacaaaaaaagagcatcttaattaaaagatgctcttactagatatgttttgctcgccatattcaatggtaaccccctaagtcaaaagactacaaacataatcctttaacgcgggctgttaaacctcaaaatgtgccgacacgaacatattcaattattttttgatattgtagaatgagttgatacctttgtatgaagctgtatcgcctaattgttcttcaatacgcattaattggttgtacttagctaaacgatcagtacggctcattgaacctgtcttgatttggccagcgtttgtagcaacaactaagtcagcgattgttgtatcttcagtttcacctgaacgatgtgaaacaacagctgtgtagccagcttctttagccatttcgattgcttctaatgattctgttaatgtaccgatttggttaactttaacaagaattgagttagcagcgcccatcttgatacccttacgtaggtaatcagtgtttgttacgaagaagtcatcaccaacaagttgaactttttcgccaagttctttagtgattgatgcccagtcttcccagttgttttcatcgataggatcttcgattgaaatgattgggtatttagcaactaagccttcaaggtatttaacgaattcaggtgttgtgaattcttccccagttgaccaacgtaatttgtatgtcttgtcttcgttgttccataattctgatgaagcaacgtcgatagcgattgaaatatcttcgcctggtttgtaaccagctttttcaatagctttgatcaagtattgtaaaggttcttcgttgtttgcgaagtcaggtgcgaaaccaccttcatcaccaacagaagtaactttaccgtcagctgataaaagactcttcaatgcttggaaagtttctgaacccatacggatagcttcgcgtacagatttagcaccaacaggcataatcatgaattcttggaaatcaactttgttatctgagtgagcaccaccgttgataacgttcatcattggtgttggtaatacgtgagcgttagggccgccaagatattcgtacaatggtaagcctaattcgtcagcagcagcacgtgcagcagctaatgaaatacctaagattgcgttagcgcctaatttacctttgttttctgtaccatctaattgaatcatagcagcatcgataccgcgttgatctgtagcgtcgaaaccaatgatttcttttgcaagaggaccattaacgttttcaacagcttttaaaacacctttgccaccaaaacgtgatttgtcgccgtcacgtaattcaacagcttcatgttcaccagttgaagcacctgaaggaacgattgcgcgaccaaagccgccatcttctgtgtaaacttcaacttcgacagtaggattgccacgtgagtctaaaacttcgcgacctaaaatatcagtaataattgacatgtaattttctccttttttggctaatgttaagcattagcgcttttttggatgtcaggcaaagcctacatctattttagctaattttacgccattcgtaaacaggaatgcgttaaaaattagtcgttaaagtgaactaagtctaagaatgaagcaggttccatacttgcgccaccaactaaaccaccgtcgatgtcttctttgcccatgatttctttaacatttgcaggtttaactgaaccaccgtattggatacgaactttgtcagcaactgtttggtcgtataacttagcaactgtttgacgaacaacagcacagatttcttgtgcttggtcagcagaagcagttttaccagtaccgattgcccagattggttcgtaagcaatgaccattgagctaacttggtcagctgaaaggcctttaagaccttctgttacttggtttgaaacccattcttcagctttgccagcttcacgtgtttcaagtgattcgccacaacagaagataggtgtcatgttgtttttgaagattgcgtgtgcttttttattgatatcttcatcagtttcgtggaagtaatcacgacgttctgaatgaccgatgatgacataatcaacacccatttcattcaatgtttttggtgaagtttcgccagtgaatgcaccagcatcttcgaagtaacagttttcagcagcaacttttaagtctgtgcctttagctgcttctaataaagcaggtaagtcaacagcaggtgcaccgataactgattctgtttgatcaaacttaggtaagttggctttgatagcattcacgaactcagttgtttgagttgggttcatgttcattttccagttaccagcaatgattggtttacgcatgagaaaatctccttttaattttaaattatttgtctgaaatagcagcgataccaggtaatgtcttaccttctaggtattcaagtgatgcgccaccaccagtagaaatatgggttaacttgtcgccaacgcctaatttcttaactgcggctgttgaatcgccaccaccgacgattgttgtagcgcctgataagttacctaagaattcgccgattgccaatgtccctttagcaaagttgtccatttcaaacacacccatagggccgttccaaacaacagtcttagcatctttaaggacgttttcgaagtcagcaattgctttaggtccgatatctaatgccatgtagccatcaggaatgttaccttcaacaatttctgtcttagcatcgtttgagaatgcgtctgcaacaacgttatctacaggcaatactaatttgtcgccagctttttcgattaattctttagccaattcgatcttatcttcttcaactaatgagttaccaattgataaacctttagcagcgtagaaagtataagtcataccaccaccgacaatgactttgtcagctttagctaataaatgttcgataacaccgattttgtcagaaacctttgcgccacctaagatagcaacaaatggacgttctggagcgtcaactgcttcgcccaagaatttgatttctttttctaataagtaaccagcaactgcaggtttgttattagctttcatagctgttgcaatcccaacgtttgatgcgtgagcacggtgagctgtaccgaaagcgtcgtttacgaacatgtcgcctaatgatgcccaatattcgcccaacttaggatcgtttttactttcgcgtttgccaaagtcgttgtcgatgtcttggaaacgagtgttttccataaccaatacttgaccatcagtcatcgcattgattgcatcttctaatgctttgccttcgtttgaagcaacgaaagcaacgtctttgtttaataattcgccaagacgtgcagcaactggtttcaatgtcaattctttcttatcttcgtcactcttgatacggcccaagtgagaaagtaagattgccttgccaccattgtcgatgatgtattggattgttggtaaagcagctacgatccggttatcgtcaccgataacgccgcctttgattggtacattaaagtcaacacgtactaagacttttttgcctttaatatcttttaaatctgcaactgtttgttttgccatgtggacaaacctcctagattttcataaaaaaaggcggaaggagtttacctcctcccgccttataaaatgctatcgcattcctaagttcacaaaagtgaaattagattaagctagcaaatttttctaatgtacggatcatttgagcagtaaagcctgattcgttgtcataccaagcaacaactttgacaacttggcctgcgccaccgccaacgatttgtgtttgagtaggatcgaatactgaaccgaattctgtaccaatgatatctgatgaaacgatttgatcatcgttgtaaccaaatgattggttgccttctgtaactttcttaacagcagcgttgatttcgtcagctgtaacttctttgtcaagagttgcaactaattctgtcaatgaaccagtgataactgggacacgttgtgcgtggccgtcaagtttacccttcaagtcaggaacaactaagccaagagctttagcagcaccagttgaatgagggatgatgttagcagcagcagcacgtgcagcacgtacgttaccaccacgatcaggaccatcttgtaatttttgtgtagctgtgtaagcatggattgttgtcattgtaccagctttgataccgaaagcatcgttaactgctttagctaaaggtgctaaacagtttgtagtacatgaagctgctgagatgatgttatcgtcagctgtgattgtgtcatcattaacaccgtaaacaactgtcttaacagcaccagcaggagctgagataagaacttttttagcaccagcatcgatatgagcttgtgatttttcttctgatgtgtagaaaccagtactttcaagaactaagtcaacaccatcattcttaacccaaggaatattacgtgcatctgattcagcataaactggaatgttcttgccatcgataacgatgctgttttctgtagctgatacttcgtggttgaattgaccatgagctgtatcatactttaataagtgtgctaacatgtctggtgatgttaaatcattgatagcaacaacttccaatacatcactgtttgttgcgtaaatacgacgtaaagctaaacgaccaatacgtccgaaaccattaatccctacttttgtagtcataatagaatttcctcctttaggaaatgaaaaattttttattttaaagggttgccccttgtaaaatcgagtttgcggcaccttcatccgtgattaaccacgtctgtttaggtgcaaggtgcatgtacgcttggattgcttgggctttagaagcaccacttgcaaccgccagtacacacggaatattcaataagtcacgaatctgtaatccgattcgcggaatcttgtacacgacttcgccttgtgcattgaagaagtaaccaaaggcttcacccaccgcatgcttttctttaagcatcttgatggtttcaatcggcatctcacgacgttcagccatcgcaatggcttcaccaatactgtgtaaaacaccccggcttcgttcaatcagttttaacacttcttgaacacttggttcttctaacaaaggcgcgtacgtcttctcactcacctgttcaggcacatacaatgcccgatgcttaccacctgtctgcttagccatttcggcacagactgcattggcctgaatatcaacactttcaccaattccccctcgagctggcacaaagattagattgcgctgtttcgatagatcagttgaaagttcatgagctgcttcagccatcgtcgttccgcccatcactgccacaatactttgcccttgtggtaataataattgtaacgtactattgactaatttgcccatttcggtgaggacttttggttgttcatcactattgccagaaacaatcaagcaatgttcaatgcctaagacttgactcaactgacgttcagtctgatgtaaccctaagaattgatccattacttgtcttaactgatcgagggtttcattccccttcacggttaaaaccatacctgatttagacgaattaagcaaaccttgtgctttcagaaaatccgtctcagttctaattactcgctcgctcatcttcagttgttccgcaagcgttcgtcggccaactggcgcgagccaatcgatatgttgtaacacctggtaacgtttcttaatgataccgacgaaatctggcgcaaccgcttctattgcagataattcatcgcgcaattgctatcgcctactttccgtgggacataaaatgtccatctgtgtcattagtcgacccatggttggcaaaaaataaaaggcaacttactaaaactagtaacttatccttttgaacaagaccattataacaagtgcagaaaacagatgcaatgctttggggttgatgaatacgttttctttccgaatattttttaaacgttgatttatcgcgatttatcaaaatttacacttgaaatttccgcttaactccgctaatataatatattgtactgttgagtatgcggaatgcgtcgctagtgtaatggatagcacccaagattccggttcttgagatccgggttcgactcccgggtgacgcataatcattaaaagataggttggtatagacgtgcttaggcattgatatatcagcctttttattttctctaaatagattgttattcatagtgaatacgacaaaccgtattcaaaaccgtattcacgtattcaacaaaaataaacgcacggggcatatacataacttacaacagacggtcatattattggccgtcttttaatttgggctaacttcattaaacagcggcctatattaaacatagaccgtcaaggatcatactagcaactactagcattagtttccgtcgtaaatcgcgactgtattcattagataaggggatgtccccaaatttggggcgatgttttaggggtaacggttcgttacgccatcacatttctatctaaacatctggctcctatgatggaattacggacaaactgttcgatataatacatcataaaggagctttttattatggcaattaaatattcaaatgaatttggtagattgcaaatttaatccgaatttttggatagtgacgagactgtcgacaacggcgacatccgtgccgcgttgaattaattgatcaacggtgtgcgagccgatgtagccggcgccacctaatactaaaactgtcatggttgtttccccctatgtaataaccttgtgtatcaattaacagtatatcatttggactgataaacaaaagcattgattggattattaaacgaaatataataatctttgctataatgggtaagttaatgatttggaagtagcgagggattaatgtggaagcacaatatgaatggcaattaaaagcaacaccaactgaccaagacttacaagcaataatggcagttgaagcactcccgaaagccgcagcccaattgttgtggcaacgaggaatcaaaacacctgaggcaatcagtgcgtttatgcatccgaatgtcggtcaattacatgatccatacgctttgtatgatatgcaaacggcagtcgatcgaatccaagcggctgtgatgggcggcgaaaaaattacagtctacggcgattacgatgccgatgggattacaagtaccgctttgatgcaagagacgctcgaaagtttaggcgccgatgtggaagtatatgtgcccaaccggtttaaagatggctacgggcccaatttagatgtctataagcaactcgttgaaaatgggacccagttgattgtgaccgttgataacggggtgagtggcttagagccaatcgcctacgcgcaagaacacggtgtcgatgtagtggtcacagatcaccatgaactaccaagtacattgccaaatgcgacagcaatcattcacccccgtcatccagagggacagtatccctttagtgatttatgtggggttggggtggcatttaaagtcgctacggcattattggaagaaatcccttacgagagtttggacctagtggcgattgggacggtctgtgatttagtgtcactgactgatgaaaatcgcgttttagttagcttaggcttacaacaattacaaaataccagtcgtcccggtttagtggctctttgccagtcagcgggtattgaacaagaaacgcttgacgccacatcgattggatttgggattgggccacgtttgaatgcgattggtcgcttaggtgatgccaacttaggtgttaatctattaacgactttcgatgaagaacaagcggtggaacaggcccaatttgtggaacaacaaaataaaaagcgccagggtcttgtgcaagaaattactgcgctagctagcgaaatggcacaaacacctgagaaccaagctagtgcgaccttagtgttggcacatgaaggctggcatgaaggtgtgctggggattgtggcgagtcatatcgttgaacaaaccggtaagccaactttagtgctagcaattgatctagcaactggccaagccaagggatcgggacgaagtgttgaagcatatcatctctttaaagcgcttgatgcccaacgcacattgttgacgcactttggtgggcatcatatggctgttggcttaacgatgccagtcgatcaattggctgctttacaaacggcgatgaatacttatgccgctgataatcagattgatttaacaacgaaacccacattggcggttgatttacaactcgcattagctgatgtgacgcccgatgtttatcaagccatcagtcaattagctccttatggcacggataacccagaacctttgattgaaatgacggtgccatccgtcaccaatgtgaagcagatcggtgcggatcagaagcatttgaaatttacggcggttgatcaagaagcgcagttagcagtcttagcatttaaccgtggtgcgttgtacgacgatttacaagcggtggaacagttgaaattagttggtcaactaagtgagaatacttggcgcggcaatacgacgttgcaattgatgctgaaagatttacaaacgagtgggcaagtgttaatcgatcaacggagtaatcggttgacgcaacagttgtttaaagctagtggcacctatgtctttttcaatgagaagcatctggcacagctacaaagttatatcccagccggcagccaagccatcttagcagccgatgtcgcacagcaagcagaattgattgtggttgatgaaccaactgatttagatgaatttgaagccttttatcgccaacaacaggccactaaaatcagctttatcttctatagtaagtattcggcatatcttgatggtattcctgataagaaacagtttacgactttcttggtttacctacgtcaacatccaggaattgaaaaagcacggttaggggaattagcgacttatctaaaaattaaattgccgctattaatttttatgttgcaggtgttttttgacttaggatttgttaaaatagaatgtggtctcatttctgccgcggaacaaccggaaaagcacgcattagaaagtgcaccgagttatcaacaacgattagctaaaattgacatggaaaagcagcttgtttactcaaccttcgcggagatgaaagactggctggcaggattcaatcagtagcaaactgttgaaagagttaaggagcgaatttaaaatggcaatcaactttaaagattacgttgcaagtgtgcccaacttccctgaagaaggtgtcacattccgtgacatctcacctttgatgtctgatggtgaagcatatgcagcagcaaccgacaagatcgtcgaatacgcaaagagtaaaggggtcgaaatgatcgttggccctgaagcccgcggattcatcgtcggctgcccagtagcttacaaattaggcgttggttttgcaccagcccgtaaaaaggggaagttaccacgcgaaaccgtctcagcaagttacggcttggaatacggcgaatcaacattatacatgcacaaagacgcggtcaaacccggtcaaaaagtgttggtcacagatgatttactcgcaacaggcggcacaatcgccgcaaccatcaaaatggttgaagaattaggtgggattgttgtcggaacagcctttttaatcgaactaaacgatttaaacggtcgcgaaaaaattaaagactacgatatcttcaaattaatggattattaatggatgtctttctaagctgggagagtctgagcattaacttaggttggtgaataaccgatgcaatcgggttgtttgcgggacgtggctagacggaagaaattgcatcagaaagcacgttaagaaaaaatgtaacgtcagtcagtcgctaaacgtaaggacctggctgaaggaacatgctaaaaaaggattcgccataacggcgaatccttttttgatagctacattctgtcgcggtataggccaacgaccttacctaagatgctaacttcattcaaaataataggttcaaatgtatcgttttctggttgtagccgataatgatcaggttccttgaagaatcgtttgcaagttgcttcatcttcagcagtcattgcaatcacgatgtcaccgttatcggcagtcgcttgtttacgaacgatcacttcatcgccgtctaaaattccggcactaatcatactttcgccgcgaatcgtcaacatgaacaaatcttgttcagtttgtagacttggtggaatcgggaaataatcggtcgcttcttcaaccgctaaaatgggcaccccagctgtaacaacaccgagaaccggaatcttcttctgtgatgcaccaattgctgtcaaaccagctgctgttaattcaatggcacgtggtttagtcggatctttttgtaaaaagccttttttctcaaggcgtgctaaatggccatgaacggtagaagtagaggataaattaacggcttcgcaaatttcacgaaccgttggcggataacctttatcttgaacgcggtcatggataaaacgcaagacctctaattgcttggattctgttctcgtcataagagcacctcatttgttctaatagctatatgttagcatacctatagcgggatttcaaacaagcgttcgtgttttttgacattttacggattttagtccaaaatagacaaatagtttgaattggagggcaacaagatggcaatggatcaaaaacgattagaccgaattaatgaattagcacacaaagcaaaagctgaaggactaactgaagctgaaacagcagaacgtcaaacactgcgcgatgcctatttaaaggacttccgcgaaagtttccgctcacaagttgagatgctacaagtgtatgacaaagaaggtaaggaagtcactcctgaaaaagtgaaggatatccaacgggaaaaaggcttgcgtgacgattaatcttagaattccgctttctttttaggttaattatgtgtaaactatttaagtgaactgaattaggaaggggtgcataagatatgggattaggcattttattatttgtcattggggctttattaggcgcagtcgctggtttctttggcgcacgtgcttacatgaagaagtatttccaagacaatccaccaattaacgaagaaatgttaaaggctatgatgatgcaaatgggtcaaaaaccatctgaaaagaaattaaatcagatgatgagctcaatgaaagcacaacaaaaacgtagcaacaaaaaataaaacagtcaagtcggttttaaaagggtttctaacgaacaagtcgtttgttagaagctctttttttatcataataagaacggaaatacaaatgattgtccggcttaattaagattgttataataggacttatcgaattttagaggataggagcataacatgggaatttttaaaaaattagggtggtattttaaacaagaataccgccgctatttatggggcgtcatctttttagtcctcgtggcgattgtccaaattgtgccaccaaaagtgattgggaccctggttgatttaatggacgccaaacaattaacggcccaaaaattaatcatgtggctcggcgtcttgttaagcgcagcgattttacaatatgtttttcgctatggttggcggacccggatttggggtggcgcggctaaactggaacggacattgcggagtcgattgttctggcatttcatgaagatggacacgaccttcttccaaaaacatcggacaggtgacttgatggcacatgccacgaatgatttaaccgcgattcaacaagtggctggtgccggtattttaacctttgccgattcaatcatcactggtgggacaacgattattgcgatggtgattttcgttgactggcgcttaacgttgatggccttgattccaatgcccttgttggccgttgcgtcacgacggttaggtgcacatttacacacagcgtttgggcaatcacaggcggctttttcacggttgaatgataaaacccaagagagtgtctctgggattaaagtcttaaaaacgtttggccaagaagaagctgatattaaagatttcaacaagattgtcacaaagacaattgcgattaataaacgtgtgaatatgattgatggtttatttgatcccgccatcagtttgattatcgggttaacgtacattgtaacaatcatttatggcgggacgttggttatgaatcacagcatttcgattggtcaattgatttcgttcattagttatatcgcggcgcttgtttggccaatgtttgcgattgggcgcttgttcaacgtcttggaacggggcaatgcgagttatgatcgggttgatcaacttttgaaagaaaccagcaccattgtcgaagcaccggatgcgattcaaacactagcaactggcgatattcattatgctgttcaaaaatttacgtaccctggcgacaaacaaccaacgctcaaacaggtggcgttcactctgccacaaggtaaaacgttgggcattgtcggaaaagttggttcgggtaaaaccacactgattaaattattattgcgtgaatatgatcagtatcaaggcgagattcaaattgatggtcacgatatccgggattattcgctggatgcgttacttgatagtatcggctatgtgccacaagataatttcttattttcaacggatgtccgcgacaatattcggtttgctgattttgaccgaaatcaagcggcggttgaagatgccgcgatttcgagtgcggtgcatgatgatattttaacgtttgtccaaggttatgaaacggtcgttggtgaacgcggtgtgtcgttatctggtgggcaaaaacaacgaattgcgattgcgcgagcgattatgactgatccagaaattctgatcttagatgattcgctatcagccgttgatgcaaagactgaagaagcgattttaatgaatttgaaaacgatgcgggctgatcaaaccaccattatcactgctaatcgcttgagtagtgtgatgcacgccgatgaaatcattgtcatggatgacggtcaaatcaccgaacgtgggacacacgaagcacttcttgccgcagatggctggtacgcagagatgtggttgaagcaacaattaagtcaagccttaggaggtgcataagatggccaagcaatatcaatcagaatggtccaagaaagttccattgaaagagcaattgcacatcatgaaacgcctctttggttatacgaaacgctataaacgccaatttatcggcgcaattgtggccgccgcaggtttagcgaccatcaatattttattaccacgattactacaagtctttatggatcgttacttaaccaatcagagtgcgaccacccaagttttaatgggggttgcggcgttgtacggtttaggcgtgattctcaaagccattacacaatttttccaatctttcctttttggaatgggttcggaacgcgcgatggaagatgtccggcgcgatttatttcagaagctccatcaactcgggatgcgttatttcgatcagacgccagcaggctcgattgtatcgcgggtcacgaatgatacgatgactttgattgattattggaatgttttcttatccttgttagtcggttcattttcaatcatttcagcgttcattgcgatgtggttaatttcaccaaaaattgcccttgcaacggcagcgtttctaccaatattgttaattgttatctggtattacagtagttacagtgcgcgggtttaccggcatatgcgtgaaaaattgagtcagttgaatacgaaactcaacgaatcaatcgaagggattacgattatccaacaattccgccaggaaaaacggttgaccgacgaattcgaacaagttaacgcggactatttaaaaacgcgcgaagcgatgattcgaacgaactcgttgttgctcgcaccaattgtgaatttactctatacactggcattggtcgttgtcttgagcttgtttggtgtctcagccctgcatagctttgtcacggcgggtttggtttatgcgttcacaacctatgttgggaacttctttaatccgatgaccaatatgatggattctttatcatcattacaagatggaatggtcgctggtcgccgaattttcagaattctcgatcaagaagaatatgcgccagctcaaaatgccgatgctgcaaatgaaattactgagggtcgcgtcgaattcaagcatgtttcgttttcatacgatgggaaaaatgaaattttgcatgacatctcatttgttgttgaacctggacaaactgtcgccttagttgggcataccggttctgggaaaagttcaattattaatgtcatgatgcggttctatgaattttatgaaggtcagattctaatcgacggacatgatattcggagttttcagacagcagaactgcgccgcaagatggggcttgttctacaagatgcattcatgttttatggtgatgtcgcatcaaatattcgattatttaatcaagagattacagatgcccaaattcgcgcagcggctgaattcgtgcaagctgatgactttatcgaacaattacctggtcaatatcatgctcgtgtaattgaaggtggcgcccaattttcaagtggacaacgccaattaatttcgtttgcgcgaacattggttacaaatcctaaaatcttggtcttggacgaagcgacggctaatatcgatacggaaacggaatcgatgattcaaactggtctcgctcggttacgtcaaggacgtacaagtattgccatcgcgcaccgtctatcgacgattcgcgatgctgaattaatcttggttttagatcaagggcagattgtcgaacggggtaatcatgatagcttagtggctcaaaaaggacgttattatgaaatgtatcaactccaaaatggtggcagtgaagaataagcagtttcaaaaaaacacgactattattattgcggagtaaatcgggaggaatttagcacatgaagaaaagacgctggctgaaatggtcgttaattagcgttgttgtcttagtggtggtagcactatttggtgccactatgtatatgtatcaatacgcatttgtaccggggcaaaaatcatttttaaatggtggtaagccaacgaaagtctatcaagacaatcaacgttggttaaaaaatgttaaacaatcaaagtggcatcaacaatctgccacagatgatttaaaattggcggcaatttatgtgccagcaacaaaacctacgaacaaaacaattttagttgcgcacggctatatgggtaaaaaagaggatatggcacgctatattcacatgtatcacgatcttggctacaacgttctcgcgccggatgaccgtgcagcaggtgaatcggaaggcgatgccattggctatggttggacggatcgcttggattacgtcaagtgggcccaaaaaattgtcgctaccaacggacaggatagtcaaattgcccttttcggggtcagcatgggtggcgcgaccgtcatgtttaccgcgggtgaaaaattacctaagcaggtgaaagcggtgattgaagattgtgggtataatagcatcgctgacgaactcgcataccaactaaacgatctctttggattgccgaaattcccgttattttacacaacgaattggatggcacgggttcgcgccggctataactttaatgatggcgatactgctaagagtttagctaactcgaaattgccaatcttcatgatccatggcgatcaagataaatttgtaccaaccaaaatggtgtatacaaattacaaagcggcgcatgcacctaaacaactctgggtggttccgggggcagctcatggtgaagccttggctacagatccaacaacctatcgtaataaagtcgcgcaatttttaaatgaatatcttcaataagtctgtttaattgtattttgaagtcgatttggtatgatagatatataaatatattgatatcgctaatccgttaggtgaggctcctatatgaacaaacgctgctactcagaaacatcgagagatgccaattgagtcaacagaaactgccctgaaggctttttctaatgtagctgaacaaagttctacgtcatatagtgctaaagctcaacgattggaatggcttgtttttcttgtgaggcatcctttctttgaggatgccttttttatgcggatcagctgcgaatgagagggattacgatggctaagacaattaaaatgacactcaatcagattaatcaattaacgccaaaagcgagtttagaacatttcgaaactgacaagaaggggttatcacggcagcaacgaacagcacggttacaaacctatggggaaaatacgattcaaaagcggcaacagcgttcgttattgcgagctagttggcagagcgtgcaagatccgtttatcggcgtattagccgtcttaatgatcatctcctggctcagtcgagatattgatggcgcgatagttatgttaatcatgattgttgtgtctagtagcattcgattcgtgcaagagcgcaagtccgagcaagcgagcattgctttacaagcgatgttggcaaagaccagccgggttgtaattgagggtcaaccaactgaagttgccgcacaaagtctggtacctggggatattgtgcagctgcagacgggggatttggtgaatgctgatttaaaaattctggcgagccatgatttacaaattaatcaatcttctttgacgggtgaatcaaaacccgtgagcaaacgcataacagcgtaagcaactgacgtaacgaatgcggcggatatggcgagtttattgctgatgggcagcaccgttgtcaatgggcaagctaccgcgttagtgattgccacgggtcaagcgacttgctttagcgcaattgtgactactgaacctaagtcgcgaccgaatcaatttgatgcagggttaaaacacatcagttggttattaattcgcatgatgctcgttttggtgccctttgtatttgtgattaatggtgtgactaagggagattggcaacagtcgtttttctttgcgattgcagtggcagttggtttgacaccggagatgttaccgatgatcgtcaatagtaatctggcgaaaggcagtgtcgttttaagtcaacaacaggtcatcgtaaagcagttaaaagccattcagaatctcggggcgatgtcggttttatgtacggataaaacggggacgttgacggaagatcatattaaattgatgtactatgcagatattttaggaaagcgggatgtgcaagttttgcgattagcatatttgaacgccaagggtcaatccggctggcagaaccttctggatgaggcgattattcattactatgaacaagaccaaaccaatgatgattttccatattaaaaattgggcgagattccatttaatttcgagcggcggcggctaacggtctggctcaaaaaccatgcaggtaatcaattagtgccaaaaggggcctttgaagaagtgctagcaacgtgttcccaagtcaggttagcggatcagattgagccgttgactgaagtgcaaaagcagaacctagtggcagtgcatgatcgtttggcacaacaagggatgcggatgctggcggttgcttatcaagatgagttagcagagacggcatcaattgaccgcgttggtaatcaaggtttgattttcgccggctttttgggctttttggacccaccaaaacaatcagctatctcggcaattcaacaactacaagctcatcaagtggcggtcaaaattttaacgggtgacagtgctttaacgacgcagcaagttgcccaaaaagtgggcattcagaatctagctgtgaccactggtgagatgttagagacgttaacggatgcacaagtcagtgagctattaaccgagcaagcattatttgccaaattggctccacttcaaaaagcgcgtttaatccgtttattacaagcacaaggggaagtcgtcggtttcatgggcgatggcattaatgatacgacagctttgaaacaagcagatgtcgggatttcagttgataatgccgcagacctcacaaaggatgctagcgatgtaatcctactggaaaaagatttgaacgttttagaacacggggtgcttgaaggacggagagtctttatcaatatgtataagtacattcggattacgttagcttctaatctaggaaatgttttgagcgtgctggttgccagcatctgtttaccatttttaccaatgttgtcactgcaaattcttgtccagaatttactgtatgatgtcgcacaactctggttaccttgggatcgggttgctgaagatcaattgcgccaaccaacacagtgggcaactaaaggcttactgaagagtgcgtttattctaggaccgttgagctcaatggttgatattttaacgtttgcgattctctggtttggatttggcctgcaaacatcagctcaacagggggctttccaagcgagttggttcgtcgttggtttattgacgcagatgctagtagtttatgtattacggacaccagcatcaccgttcaaggatcgcgcaaattggcgtgtttacttggggagtttaatcagtttgttaattggaggtattctggtattgacaccgctcagacaagccgttgatttccaagcgattccaacacaatttggctggattgcagtggcattagttacggcctatctattggtgacgaatgcggttaagaatttaacgcgctaaaaaaactgctagatgatatcatctagcagttttttgttattattttttatcaggtagttcatatttaaaatcagggttaatttcgtggtcaatttggtcaaatgcagcttgcatttgatgattgacaacttctaagttctcttcgttgagttttaatttcggatcgattgggattggttcaccaaaacgaatcgtaatctttttccgttttaaaacatcagagaattttaatggcccttggtagactgctggtacgagtgggacccgcgccatcttggcaattacgaccgcgccgcctttaagttcgcttgaatagcggctaccagtggggaacatgattaacgaaagttcttttgagcgaagggcttttactggcgttttaatcgccgatggaccaggatttgttcggttcacaggaaatgcgtttgcgtgggttaagatgaagcgtaaaattgggtttttaaagagttcttctttagccatgaacgtgaactttcggggactagcagcaagtgcgaagaagattggatcccaccaagtccggtgcgggccaactaaaacataagtcccttcgggcagggcttctttattttcgaccttcaaattgccattcaataaccaggctaaaatgcggacgataaaacgtgcaaatgagaaaaacatagtttagattcctttcaaacgtgactagtatctgctcattataccaaataatgatactctttgttataatatgcctaaatacaaatgaggttgaaggtagaacgatgttaaaagcagatgagcgaattgaccaattatttcgcttagatattcagattattcaaagcccatccgtcttttcctattcgatggatgcggtgttgttagccgactttgcccagttaccaaaacgcgggacgattgtcgatttgtgcgcaggcaatggggcggttggattattcatgagtcccaaaacaaatggtcaaattatcggtgttgaacttcaagaacggttggctgacatggcacaacggtcaattgaattaaatgacttaaccgaccaggtgacaatgctcaatatggatttgaaagacgttaacactaagattcataaggacagcgtcgatattgtgacctgtaatccaccatattttaaggttgaacccaatagtcaaaaaaatcccaatcaacatctggcactggcgcggcatgagattgcaacggacttacgcactgtggttcaaaccatgagtggcctgttaaagatgaatggtaaagggtatttagtccaccgtcccgaacggttcttagaaatctgtgacgaactacgcgccgcacgcatggaacccaaacgcgtccggtttgtttatcccaaagcaggcaaagaagcgaatatggtgttaattgaagcggtcaaagatggtaaaaaagggggcttacgaatgcttccggaactgacgatttatgaccaagacagccactatacaccagagatacgcacgaagttattcatggctgacaatgactgagaaggcttattatttttacgtattagtctgcgccgatcatagtttttatggggggttcacgactgacgttaccaaacgcgttgccacgcacaatgctggcaaaggtgcgaagtacacaaaattgcgccgaccagtgcggttattatattttgaaacgtttagtgataaatcggcggcgcttaaagcagagtatgcgttcaaacatcaaccccgccgcaaaaaagaacaatatttaatggaacatggcatttcaagaactcaattttagaatggagagaccaatatgcaacctaagttagttgtcgatcaacacattcatttacaacctgtgacggaagcggatgcgccggcgttatttcagttagtggatcaaaatcgcgtcaatctcgatacttggttaccatgggtgggcgatatcgaatcagtggccgatgaacttggctttttaaaatatgcgcaacaacaaatggcaaaccaggaactttggatggcaacgatttgggatgaccaccagttagttggtacgattgatgtccacaatattgatgacttgaatcgtgcgggtgaagttggctattggttagatgaagctttccgcggacgaggtgtcatgcatcgcgcactagccgccattgaacaatacgcggccagtgaattggaacttgaccagttgagtatcattactgcacacgaaaacgtggcgagtcagcaagtcgcgctaaaagcgggctatcgagcggttgaaacagtgagtggcgttacctcagtgagccaccaaccacaagatgcaacccgttatcagaaacaattgggcggcatgtaagttcttgttgacgcgccttgttatttttagtatacttttaaacggtatttcaataccaaaaaataattcacactggttgatttctagagaggtgcttggcgacaagttctctaaaaaagtgaaaccagtggtcgaaaaaaaccatatggaggtctgttgacatggctgtattgtcaatgaaacaattattagaagcgggtgttcacttcggtcaccaaacacgtcgttggaacccaaaaatgaagaaatttatctttactgaaagaaatggtatctacatcatcgacttgcaaaagacagttcgcatggttgacgatgcttatgacttcgttaaagaagaagctgctaacgaaggtgtattcttattcgttggtactaagaaacaagcacaagatgcaattgctgaagaatcagtacgtgcaggccaatactttgtaaaccaccgttggttaggtgggactttgactaactgggacacaatccaaaaacggatcaaacgtcttaaagaaatcaaagcaatggacgaagatggtacattcgatcgtttacctaagaaagaagttgccttgttgaagaaacaacaagaaaaacttgaaaaattcttaggcggtatcgaagatatgcctcgcatcccagacgtaatgttcgttgttgatcctcgtaaagaacgcattgctatcaaggaagcgcaaaaattaaatatcccagtcgttgctatggttgatactaactcagatcctgatgatattgatgttatcatcccatcaaacgatgacgctatccgcgctgttcgtttaatcacagctaaaatggctgatgctatcatcgaaggccgccaaggtgaagatgatgttgaagaagctacatttgctgcagaaaacaaatcagcagactcaatggaagaaatcgttgaagcagttgaaggcgacaacgatactaacactgacgctaaatagtagattcaaataagctgtcttagaggtttcgcaaatactgcctgacttgtgggacagctttttttaaaccaattatattgaatataaattgtcggaggtatgaattatggctgaaattaaagctgctcaagtaatggaattacgtaagaaaactggcgttgggatcatggacgctaaaaaagcccttgtagaaagtaacggcgacgttgctcaagcaatcgatgctttacgtgaaaaagggatggcaaaggctgctaagaagagcgaccgcattgctgctgaaggtttagcaggcatcgccatcgatggtaacactgctgcaatcgttgaagtgaactcagaaactgacttcgttgcttcaaacgatcaattcaaagctttattgaaagatattgctgaaacaatcgctaaaaacaaaccagctgacatggcagctgcagaagcattaccaatgggcgaaggcacaattgctagctcagtaatcaacttaactgctgttatcggcgaaaagatcagcttccgtcgtttcgaattagttgaaaaaaatgatggcgatcactttggcgcatacctacacaatggtggccaaatcgcttcattagttactttagaaggtgctgacgatgaagcagctcatgacgttgcaatgcacgtttcagctgttaaccctcaatacgtttctcgtgaagatgttcctgctgaaacattggatcacgaacgtgaagtattaactgaagaaacaaagaacgaaggcaaaccagaaaacatcattcctaaaatcgttgaaggccgtgttaacaagttcttgtcagaaatcagcttgaacgaccaagctttcatcaaagactcagatcaaactgttgcacaatttgttgcatctaagaacggtagcgttaaaggtttcgttcgtttcacagttggtgaagggatcgagaaaaaagaaaataactttgttgatgaagtcatgggccaaatcaaataagcttattttgcttcaaaaagggaacgcaatttgcgctccttttttttgcagttttacgataattcagaatcgcatacccaaataacttattaaatatggtaaaatgagcctagtaatcaacggagggatatcaatcatgtcaaatacaaaatacaaacgcatcgtcttaaaagtgagtggtgaagcacttgctggcgaccaaggtttcggaattaaccctgaaattgttaaagtagtcgcaaacgaaatcaaatcagttcacgatttaggggttcaaattgccattgtctgtggcggtgggaacatctggcgtggtgtgactggtgaacaaatgggcatggaacgtgcgcaagccgattatatgggcatgatggcaacggtcatgaatgctttagctttacaagataacttagagagcattggtgtcccaacgcgtgtgcaaacatcaattgaaatgcgtcaaatcgcagaaccttatatccgtcggaaggctgttcgtcatttagaaaaaggccgcgttgtgatttttgctggtgggacagggaacccttacttctcaacagatacaacggctgcattacgagctgctgaaattgatgcagatgtgatcttgatggctaagaacaacgttgatggtgtttactctgctgatcctaacactgattcaagtgccgttaaattcgacacattaacacatttagatattatcaacaaaggcttgcaagtgatggattcaactgcaagtactttatcaatggacaatgatatcccattggtagtcttcaacttaaacgaaccaaacaatatcaaaaaagttgttgaaggtgccaatatcgggacaacgatcgaaggaggagaataatatggcaaatccaattttagatgaagcaaaagcaagcatggaaaaagcagaagcttcattacaaagaacattaggccaaattcgtgctggtcgcgcgaatgcaagcttggtcaaccgcgtgaatgttgagtattacggtgcaatgacaccacttaaccaaatcgccgcaattacagtcccagaagcacgggtcttgttgattaccccttatgacaagggtgcgcttgaagatatcgaaaaagctctttatacagctgatttagggatttcaccagccaacgatggctcagtaatccgtttagtaattccacaattaactggtgaacgtcggaaggaaattgctaaagaagttggtaaagaagctgaaatcggcaaagttgccatcagaaatgcacgtcgtgatgcaatggacagcttgaaaaaagctgaaaaagcaagcgagattagtgaagatgaaatgcatgatttagaagaacaagttcaaaaattgacgaatgaagcaacgaagaagattgacgaaatcgccaagaacaaagaaaaagaaatcacagaaggttaatccctaatggatgcaaaaagccccgccacaacagtggcggggctttttttgcgttaatgaataattttactcttcgtcgcttctttgtggagtttttcaaagaatggattgattcgatctttcaggaagaggccaattaggaagaaaacaaccgcaaagagcgctaggatgataaagttatgccagaggttcggtgcgtaaatcccaccagttggttcgcgtaagaggttgaccccgtatgtgaacggtaaaatggggttaataaactggaagaattgatcggagaggacaactgggaagttcccgccaccgccagagatggaaagcaccaagacaatcatcgcaattcctttaccaacgttcccgaacatcgcggcgagaacgtaaacaattgtcatgaagaccatgctcaggaagacggctaataagattagcggtagtttatcaacgatgtaggccttcaataagaaaatattaccaagcgtcacaatcacggcttgggcgacaccaatgacgatgtaggttagccagcgagcaataaattgctgtttcttagtgtactgtttcttttgtttgtcgtctaacgcgaagttggttaagacgatgttactcaaaagaagtgcaccaacccagagacaaagggctgtgtagaacggcgcacttgctgagccataggtcttaatcgggtagacgtgtttttctttcagttcaaccggtttggctaagaaattactttccttagttgcatcgcggcgaagcaatttaatcagatctttgagatcgaccgtcttttgttgtttgcgaatcgcctcagcgcctttttggatcccgctacgtaagaatggccaatcattgttgatgaggtcggtcgcatcatttaaggcggttttaacgagtgggaatttctcgttggccatgttgagcgtcgttgttaagtcgttttcgatgcctggtaagtcattgttgatgaaactggttgccagttgcagtttatttttgagtagtgggtaatcattctggtaaacgtcagaagcggtgtttaatccagagataatcgtgcccatattgccatttaataatgtattcgcgtcatgaatttcttgtttcaacgctggtaactgctgagcatatttttgcagatagtcgatggcttgttggagcgtcttttgtgtgttgaataagagtgcggggagtttcggtaaaacttcgccgttaagctgtgttaagacggcgttaccgctagcaattaatgttgaaaagcggtcgagcatatttttgacgctgtcaccgatatgggccgcttgaatcttagcgacgctgtcttcgacttggtcggcgtattgaatcaaaccattaatcttggtttgcaaatcgtcaattgataaatcatcgtaatgggcgagaaggtcatcaacttggcctttaaaaacgccgagttgggtcgccaacgtatttaaatgtttaatcggtgtatcaagtgcatgtgattccggttgaccattcgccactgctgactgattgtagctgtcttgcaagttttggagggttgtcgcaagttgagtcgcatgggtttgcaaggtagcggtgtgatcagataagttctggagcgcttctttgagcgcttgcttgagttcagcattattgggatcctctttgagttgactcagcaaactattgacggccgttaaattagttgaaatgttagttgccaattgattggtaatggctaacccttgatccaccgttttttgaatgaccggtaaagcagcttggagtttagggattaggtctgattgtaattgacccgcgacaccttgggccgtttggctaaaagtcattaagtccggtaagactttttgtgttttgtttaacacatctaaaccagtttgagcttcgttaatgccgttcgttaaagtattggcgatgccatcgaaatcagaatcgagtgtggcaacttgtttgccagcactttggatttctggaatcttagcctgaacttttgttgcgagctgaccggctgcttcaacttgtggtaagtattgattgatgccgactactttttgtgccatggcatttgcttgtggtaaaaaggccgcgaactcgttggcttgggcaagctttaatgccatttccggtagtttcttttgtagattaagcacttgttctgcgtattggttaatttctggaatttgttggtctgttttgagaatgaggctcgagaaacgattaatgacggggagatttgtattgagatcaatcccggccttgtttagggtactcatcaatgttttaccaacggttgagacgaattcttctgaaatggtggactgaagcgtagttgcacccgcactggtaattttaggcgcaatcgcgttaatcttatcattagatgagtagactatctttggcttttgaatcttgccatcgacgaaactaacgagatcctttgagaagtttttgggcacgtaaatcccggcgtagtatttccccgtttttacgccgtcatctaattcttttttgctcgaagtaaattgccagcctaatttgtcgtttttctttaattggctaattagttcggcgccaatctcgacttttttgtcagcaatgacaacactttgatcggctgagtaaacagcgacttttaagtcttgcgttttactataagggtcccataacgcccagatattaaaccacgcgtagagcgatggaatgataatgagggcaataattaatagaagagcgatcgggctttttaagattcgacgccaatcaagtcgaaagagttcgaaggtttttcgcataataaactccctttttctgtttaaggtatgtattagtttatcatatttaacctgttacataccaataactataggaatctactaatatttaacaataaatttcaatgtgatagcggcaacagtacgttgtggcgggaatcgttggtattaaaggcttaatcgtggataaaaatcatctgggaagaactcaaaaagtgcagaatgggcggttcagtttgtacaatgccggtgacaatcggttgattttaaatagtcacttcctgtgatttttggtacaatcatatgagagttattgaaactggaggagtatgtggtgtttacaaataaaaaaacagacgcacaacaactagatcccaccaatatccccaaccacgttgccatcatcatggatggtaacggtcggtgggcgaagaaacgcttaatgccaagaatcgctgggcataaagcaggaatggaaaacgttaagacgattaccaaaacggccagtcgaatgggtgttaaagtcttaacgttgtacgctttttcaactgaaaactggaagcgtccaaatgacgaagtgaacttcttgatgcagttaccggtcgatttttttgatacgttcatgccggaattgattgctgaaaacgtccgtgtgaaagtcatgggtaatattcaagaattaccagaaaagacgcaaaaagcggctaacaatgcgatggccgatacggctgataacacagggatgattttgaactttgcactcaattatgggtcgcgtgacgaaatccaacaagcggttaagcagattgctaaagatgcggtaaatggtacaattgaggtcgatgcaatcgacgatgcgttaattagtgattacttgatgactggctttttaggggaatatgctgacccagaattattgattcggacgagtggcgaagagcgaatttcgaacttcttactctggcaaattgcttacagcgaacttgttttcgtagatgaattctggccagactttaccccagcagtgtttgaacgctcaatcggcgcttaccaaaaacgtaatcgtcgttttggcggtcttaaataggagggaatacaattatgaaacaacgtgtcattacagcaacaattgctttaatcatctttatccccatcattttctttggtggtatttacattgatatcgcggcagccgttttagcactcgttgccttatcagaagttttcatcatgcgtaaacgaatcattgtctcacctgatgcaaccatcgccggactagcggtgttaagtttagcctcacccaaaggcgcctttaactggttaccagcaggtgtgtcacaatttgatttattctacttcttcgttgccattttattagccatcacagtcttcacgaaaaaccgggttaacttcgatgatatgggtgtcacaaccttagccagtctctatatcggcttaggcttccattatttagccgcaacgcgaaatattggtggttttgacactgtgatgtatatcttattggtcatctggatgacagatatcggtgcctacacattcggacggatgtttggtaagaataaaatgtggccagctatcagccccaataaaacttgggaaggttcaattggcgggacattatcagcattagtggtcgcagctatttatttaaacttcttcccacaagcttattcaatgcctgtcatgttaggtttaacgttgatcttctcaattgccggtcaattaggcgatttagtcgaatcagcttacaaacgctattatggcgttaaagactcaggtaaaatcttaccaggtcacggcggcatcttagatcgctttgacagcatgttgtttgtcttaccgctactacacttgtttggcatgatttagagtgcgtttgtggcggttagcaactgagcattaatacaaaaattcgaataatcccggttttaggattatttgaaattttagattaagcggaagttgttgcaaccaaaaagcacgtttttaaaagtcaatattatctagcgtttagcgcaactttttggtttgcgctaaacgcttttcttgtttctaaggaattcgtgatataatataacagttcatatcaaatgagagtattgaaatacgcatttagaagggagtcgtactctattggcggcgattattgcgtttattatcatatttggcattttagtagtggtgcatgaatttggccacttttacatggcgaaacgttctggtattttggtgcgtgaattttcaattggcatggggccaaaattatttgcaacgcgcaaaaatggcacgacttatacgattcgttggttaccacttggcggctatgtccgcatggcggggatggcggatgatgaatctgaaatcgaagccggcacgcaagcaaccttgctgttagacgaacaagaaactgttcaaaaaattaatacaagtgacaaagtaacctcgttaaacggtgtcccatttcaaattgcaaaaactgacttgcaaaaagaattatggattgaaggctatgaaagtgatgacgaatccgaattaaaacgttattcggtcagtcacgatgcaacgattgttgaatcagacggaacggaagtgcaaatcgcacccgtggatgttcaattccagtcggctagtttaatcaatcggatgttgaccaacttcgcaggaccgttcaacaactttatccttgcgattgtggcgtttgcgctctttgcttttttaaacggtggcgtcccacaaaacaaagcgattgttggcacagtgatgccaaactcgccagcacaaaaagccgggcttaaaacggatgaccggttagtgaaagttgctggcaaaaaagtcacgacgtttactgatttcagctcggtgattgcaaaatatccgaataaaccagtgaatgtccaggttaaacgggcaaagcaaactaagtcactcgaaatcacacctaaagcggtgaaagtcgagggacaaaaggggaaagtcggccaaattggtgtgacagctggactcaaccatagcgtgggggctaagttgaaatatggcttcacccaatcatgggcgaatgcgacccagatttttaaaattctcgggtcattcttaacgggtggtttttcactcaataaactagccggaccagtcggcatgtattcaatgacgacgcaattcgcgagtcaaggctttacaatgctcgtctacttcttagcgttcttatccgtcaacttggggattatgaacctgattccaattccggccctcgatggtggtaagctcgtgatcaacgtgattgaagcgattcgcggtaaacccatctcaccggaaaaagaaggcattgtcacccttgtcggggtcggcatcatggtcgtcttaatggtcttggttacatggaacgatattcaacgctttttcttttagattatttttggaggcataacagattatgaaacagtcaaaattatttatcccaactttaaaggaagtgcctaactcggccgaggctaagagccatcggatgatgttacgggccggctatattcaccaagtatctgctggtgtttacagttacttacctttagcattccgcgtcttggaaaatatccaagccatcatcaaagatgaaatgagcaagattgacgccgttcaaatgcaaatgccagggattttacctgctgaattgtgggaagaatcaggtcgttacgaaacatatggcgataacttattcaagttcaaggaccgtcatggccgcgacttcatcttaggcccaacacacgaagaaactttcgctgacttggtgcgcaatgaaattaagtcatacaaaaaattaccattaacgttatatcaaatccaaacgaagtatcgtgacgaagatcgtccacgttatggtttattacgcggccgtgaattcatcatgcaagatgcttattcattttcagccaatgaaactgatttggatacgactttccgccaaatgtaccaagcatacaccaacatttttgaacgctgtgggttagacttccgcgcaatcgttggggatgccggtgccatgggtggtaaggattcaatggaattttctgcgattgctgaaattggggaagatacgattgtttattcagaccaaagtgattatgctgccaaccttgaaatggcaacgagtatccgtcctaagcaaaactcaagtgatgtgcaattagagcttgaaaaagtagcgactggcgatgcccacacaattgaagaagtggctgctaaattagacgtcccagcacaacaaattatcaagagtgtcctctttatcgctgacgaccaaccggtcttggtcttagtgcgtggcgattttgaagttaatgatgtgaagttgaagaacttcttagatgctgatttcttagaaatggcaaccccagaacaagtcttagcaacaatgaacgcaccaatgggttcaatcggaccagttaacgcgccagaagacttacaaatcgttgctgattacagtgtcgaagccatggtgaatgccgtggttggggcgaatgaagccgatcaccatttcacgaatgtcaacagcaagcgcgactttaccgtagctgattattcagacctacgtttcgttcaagaaggcgaaacatcacctgatggtcaagggaacttgcactttacaaaggggattgaaattgggcatatcttcaaactaggcacacgttacactgaacaattcggtgccactttcttagatgaaaatggccgtgcgaaaccaattatcatgggttcttacggaatcggtgtgagtcgcctcttatcagcgattacggaacaacaagctgacgaaaacggcttagtttggccaagcgcgattgccccttatgacttgcatgtcgtaccggtcaatgttaaagatgctgaccaagtcttattagctgaacagatcgaaaacttacttgaagaagcaggttactcagtcttagttgatgatcgtaaagaacgggctggcgttaagtttgccgacagtgacttaatcggcttaccaatccgcatcacagttggtaaaaaagcagcagaagaaatcgtcgaagttaaattacgtaagacgggtgaaaccctagaagtgaagaaggatgaattgattaattcattaggtatcctattggcttcagagacaacagaagctgaatagagtgcgttcaagctcggtcaacttttgagcattagcacagggaagcgaattaacgacgcagtcgataatttgattcccagcgctaagcgcagaaagttagcttgaaaagcacgtttaggaatagagtgcgtttgaaaccgtttggctccaagcattaacttaaattcgtgaatgagcgacaacgtcgatcgttcgcgaattgtagttaagcacaagaggcagtttcaaaaagcacgtttacattataaatgttcggacatctaagaagggctgagacagaatcatatttgtcctagccccttttatttaactttctgaatatgaggaggcccttttgtggcattagatcaaaccgcactgtttcaaaaattattagaacaaattgatttacccgcggatgttgcgaattatcctggcttcaaaactggccaagtagaacaagtcgttgtccacgaaacatctaaacggtggacttttaaattacatttcgaatccgttttgccatatgctgtttacacaacgtttgaacagtatctagaagcagccttcaaatcaattgcggatatcgcggtcgacatttcgaccgatgcaactgaattagacggcggcgttttagcagcttattgggaatacgtcatcaaccatagtgggattcaatcttcaatgttgcacgaattgtgtgaaaaagagaccccctatatcgacggtcgcaacgtctttttagttgtcgaaaacgacatcgtgaagacgttcttcttaaatcaagcgcaaacgacaatccaagctggttatcaacggcttggttttcccaagtttgcgattcaacccttgattgacgaatccgcctcacaaaaggcaatcgaagattttcaagcgaagaaggctgaacaagatgcagcccgcgcacaagcggcagccgaagcgatcaagaaaaatgaagcactcaaagaaaaacgtcaatcagaaggcaaaccagtcgatggcccgatttcaatgggccgcggcttaaatcctgctgaaccaacccgtcagatgattacaatcaatgaagaagaacgttccgttgtcattgaagggttcgtctttgataaagaagtccgcgttttacgttctggccgccagctcttgattttgaagatgacagattactcatcatcatttacggtcaagaaattctcccgggataacggcgacgaaagtatcttcgcagccatcgataaaggcatgtggttcaaggtacgtgggagtgttcaagaagataacttcatgcgtgatctcgtggtcaacgccaatgatttggtggaagttagccatcccaaacgccaagataccgctgaaaatggcaagcgcgtcgaactgcacttgcacaccaatatgtcacaaatggatgcgaccaacaagattggcgactttgttcaacaagccgctaaatggggccaatccgcgattgcggtgaccgatcattataacttacaagctttcccagatgctcatgcagcgggtaagaaaaacggcgttaagattttgtacggtgtcgaagtcaatttagtcaatgatggcacgccagtcgcgtataacttgcgcgatgaagcgctcgaccatgctgaatacgtgattttcgatgtggaaacgaccggattatcggccgtttacgattcgattatcgaattggccgctgtcaaaatgaaagatggcgaagtgattggctcgttcgatgaatttattgatcccggtcacccgttatcagctttcacaacgcaattgacgagtatcaccaatgaaatggtgcacggtgctaagaaagaagccgaagtcctagcgctgtttaaagaattcgcgggcgacgccgtcttagctgggcataacgtgacgtttgatatgggctttatcaatgctggctatgggcgtaacgatctcggtcagattgaaaatcccgtcatcgatacgttggaagtctcccggatgctccatccagaatacaaaaatcataaactcgatacattaaccaaacgttacaaaatcaacttggaacatcatcatcgcgctaatgccgatgctgaatcaaccggttatttgttatacaaattagaagccgaagcggccgagatgtatgggatggtcaacgtcaatcaactgaatgatcgcgttgggattggcgatgcgtataaacaagcacggccagcgcatgcgattttaatggcgcagacccaagccgggttgaagaacttatttaaactggtttcagcctcaatgaccgaatactattaccgcacaccacgcttgccaaagagtcgcttggatgctttacgtgaagggatcttagtcggttcagcttgtgccagcggtgaagtcttcgaagcgatgatgcaaaaagggtaccaagaagcgcgtgatcgcgcgaagtattacgattaccttgaagtaatgccaaaagccgtttacgcaccattattagaacgtgaattagttcgcgataatcgggcgcttgaagaaatcattcgcaacatggtcaaactcggtgctgaattggataaaccagtggttgcaactggggatacacattatttgaatccagaagattcaatctatcggaagattttgattcactcgatgggtggtgccaatccactgaaccggtcacaattaccggatgttcatttcagatcaaccgatgaaatgttgacggcgttcgattttcttggtgccgatattgcccaaaaactcgtggtgacgaacccgaaccaaatcgccgatatgattgatgaaatcacaccggttaaagataagttgtacacgccgaagatggcgggtgccgaagatgaaattcaaaccttaacgatgaatcgtgcgcatgaattatacggggatgaactccctgaaatcgtgcaggcccgccttgataaggaattgaagagtatcatcgggaacggtttctccgttatctacctgatttcgcaaaagcttgtgtataagagtggtaaggatgggtacttggttggttcccgggggtccgttgggtcgagtttagtcgcaacgatgaccgggattaccgaagttaatccattgccgccacattatcgctgtcccaactgtcattactccgaattttataccaaaggggaagtcggttcgggttacgatttagccgataaggactgccctgaatgtgggacaccacttgataaagacggccatgatattccatttgaaaccttccttggcttccacggggataaagtgcccgatatcgatttgaacttctccggtgattaccaaccggttgcgcataactacaccaaagtcttgttcggggaaaataacgtgttccgcgctgggacgatcgggacggttgctgataaaaccgcctacggctatgtcaaagcctacgaacgtgataccgaacaaactttccgcggcgcagaagtcgatcgcctggccaaaggttcaacaggtgttaaacggacgactggccaacatccggccggcatcatcgtagtgcccgattatatggacatctatgatttcacaccaatccagttcccggccgacgatcaagatgcggcttggaagacgacccattttgatttccattcaattcatgataatatcttaaaacttgatatcctggggcatgatgatcccacgatgattcggatgctgcaagatttatcggggattgatcccaagacgattccaaccgatgatcctggtgtgatggccttgttctccggcactgattcactcggggtaacgccagaacagattaattcgaaaatgggcacgctcggtgtaccagaattcgggacgcggtttgtccgcggaatgctcgaagaaacgcaccccacgacgttctcagaattattgcaaatttctggcctttcgcatgggaccgacgtgtggttgggtaatgccgaagaactgattaacaaaggcgttgttaccctaaaagacgttatcggttgtcgggataacatcatgatggatttaattcactggggtatggacgatagcatgtcgtttaacatcatggaacgggttcgtaagggtaaagggattccggatgactggcaacaagccatgcgcgacaatgaaaatgtgccagactggtacattgattcctgcctgaaaattaagtacatgttccccaaggcccatgcgaccgcctatattttgatggcgttgcggattgcctacttcaaagtctacttcccaattatctattactgtgcttacttcagtgtgcgtgccgaagatttcgacctcgtggccatggcccaaggtaaagaaggcgtcaaagcgcgcatgaaggaaatcactgataaagggatggaagccagcaccaaggaaaaaaatttgttgacggttctcgaaatcgccaacgaatgtttggaacgtgggattaacatcaagatggtcgacattgaaaaatcagattcatctgatttcttgatccaagacgaccatactttactcgcaccattccgtgccgtcccaagtctgggcggtaacgtcgccaaacaaatcgtttccgcccgcgaagaaaagccattcttatctaaagaagacttatccaaccgtgggaaagtttccaagacactgatcgaatacctaacagaaaataacgtattgaatgacctgcctgatgaaaatcagttatcgttgtttgatatgatgtaaaaaagccttcatactttcactgaaaataaattttcggagaagtatgaaggctttttattttgcacatattttatgcaattttaaaaaattacataaaatttgttgaataaacttttgattcgacgtatactaagcatattaaataagtgttgaaggaggatttaatggagaaacttagtaagtttgttgaatttgtgagtggctctccacaatctcgtctatttgtttcaatgaatgaaagtgatcccagttattgtatttatgggcaatctgaattgaaagctgatttagttcagtcagaaacatcgtacaatgagggacgtcaaattcggacccctgataaagttatgattttatcagaaggcgatattatttttaatttagtttctggagaagcaagtgttgttggaaaaaagcatgttggctatctacaaactcaaaattttattaaattaatccctaatcaggatttggatactcactatttagttttcttgttgaatcaggatcacaatattaaaagacagcttgtaagttcattacaaggaacgatggttattaaatatacacttgcacagctaaaagcgttgataattaataaactaccaccaatagatgagcaacgattaattggaagaatgtatttcaaccaaatacgattaaactggtttagaaagcaaagtgcggatttaaaactaaaaatagcaatgaatcagttgcgaaaggactagtgaatgaacgaattaaatttcgaatcagaattaattaaatatattacaagtgggacaataacagtttctgaggatgattttcaaaaaagtaatattcgtgaaacagcaaaagattatgttgtgaagactaagctgtggcagtatcgagacgatattagaacaactgaacaactatgggctaattttaagcagattttagagcagcataatcaaaatacactcgataatccgctaagtgtcatggaatttaatcaggtgaagaaaatcatttcagatttaaaaacaccgtatgatgctggtcaatttttatatgggttaaatggtgtctctcagattgaaattgatttagatgatggtcggcatgtgtttttaaccgtttttgatcagaaacaaattggcgctggtaatacagtctatcaagtcgtcaatcaaattgaacgaccagcattactaactgggaagcaagaacggcggtttgacacaacattattaatcaatggcttaccaattattcaaattgaagagaaacgagattcacatgatgttaatgaagcacttaatcagatgcatcaatatattttagaaaatcaatacactgacattttttcaacattacagattctggtggcgattacgccgaataatgttaaatatatggccaatacaacagctgacaaatttaacaaagattttgcgtttaattggcaacggaaatcagataacaagattgtccgtaactggcgagaatttgcggattcaatgctaagtattccaatggctcatcaaatggcaactaactttatgattttggatggtactaagaacaaacaaatgattaaagtgatgcgcccttatcaagtttatgcaacacaaaacgttattcaaaaacttaaaaaagttgattttgatatgggactaaacaaaattggctacatctggcatacaacgggctcgggtaagaccattaccagttttaaaacagcgtggcttgctagtcgaatgccaggaatcgataaggtcgttttcgtcgttgatcgaattgctttaacaaagcaaacgaatgaaaattacaaagcgtatgatcctgatggtgcagtggatgatgatagtcgctctggcagtgtgcaagggacacagagtaccaacgacttaagccggaaattaaagagcaaggataacaatatcattgttacctcagtccaaaaactagaaacactggttaagcgtaagagttttaagtcacctgataaacacattgtctttattgtcgatgaagcgcaccggtcaactggtggggatgcttttgaactattgcaaaagagctttaaaaaatctgcatgggttggttatacaggcacaccaatgtttgatgaaacaactaacggtttacgaactgaagatatttttggcgaattattacatgcttacacgattaaagaagccattgctgatcgaaatgtattagggtttaaagttgattttgagacaacaattgatacggaaagtatgaaaacacaatacttaccagacttctataaaaagcaacatcgagattggactcagcaacaaatccaggacaaaattgataatttatcacaagaagatatggatgatgaaattgcacctagtttttacgatgaaaataaggatcatgtccacttagtcgttcaagatatttttaaaaactggcgcaatcgttccaatgaaggaaaatacaatgcactatttacaacccatgttggtggtggtaaagcaagtacgccaatggccatgatgtactttaaagaatttcaacgggtcaatgaagagcatgcaaaaaacggtggccaattactgaaagttgcgattacatttagtcaaaataccacgaataaagatggcatggtcgaaaccaatcagaatttacatgatgcgatgaaggtttataatcatcaatttggaacaagttttgggctagatgacgtttctggctatacgcaagatgttacgagtcgccttaatcgaactgcaactgacaagaactacctagatttagtgattgtcgtggatcaattactaaccggatttgatgcgccagaaatgaataccttgtatgttgatcgtactttaaaaggggcaggtctaattcaagcgtactctcgaacaaatcgaatcgctgatatgaaagaaaaaccttggggccgagtggttaattatcggtggccgagccagaatgaaaaattaatgaataaagcattagccatttattccaacaaggattcagccactttatcagaaaaagaacagaaaaaggaaaacgtcgattctggtgttttagcgaaagattttaaaaacatggtgcaagaggttcgtgggattgtcggccaactggatgatttaacggatggttttaatcaattaccaccaagtgaacgccaaaaagacgagatgtttgaattattgcgccaatataatgctggtatgtcgaagctcaaacaatacacaccgcaagatggtgaggaagacagtgggttcaactatgatacgccggacgatttaattcgtgctttagggatgacgccggcgcaagaaaaggaattgacgactgttttaacgaatgaaataaaacaatatattagtagacgtgatgttgttccaattcaacagattgagttaaaaatgacgcatatcaaagatgttcaggtcaactacgattacttgacggaactcgttgaaaaactcttgaatgaaatgcatgaagaaaaaattgaggctgctcagaagacgaagaaggatattgatcaattcgcaaatggtttagaagaccaaaattatgcgcacaaaattaaaaatgcgacacaagcgatccttgatagctactatccacctaaagggatggcaatgatatatcctgtcaagttggacgatagtgagcaagttattcaagaagctaatcagattagtattgatcggattttattagaatttcgaaaccagtgggggatcacagatgtgattacaagtgctgggttacgacaactatttagtacgcatcaatatggccaacaagatttagatgatgctggccaattgcgagatattattgctgaagcaagtttgagttataagaatttagcattagacgccgatatccaagcactttcgaaaatcaggtaccgaaacggattacgcgaagcaatttatttggcagctgataaacatgtaatacattaaaagatccacaattaaaggagaacgaatctaatgagtgagacaacaacattacaagacatcactaagaaattatgggcaatggctaatgaactacggggaaatatggacgctggtgaatttaagaattatatcttagcctttatgttttatcggtacctttcagaacatcaggaacaatatttagtttctaataatgtgattgatgttgccgatggacagacaattaatcaagcttatgtcgaacaagcaacggcagatgaattagctgattatcttgaagatatttcgtcaagtttaggttatgcgattgcgccagctgatacgtggcaatcattaaatgaacgaattgaaaatagcacggttattccaagtgattatcaaaccatttttgacaacttcaataagaatgctgtcttaaaccaagaagctgctcaagatttcaacggggtctttaacgacattaatctcggtgattcgcgcttaggtagttcaacgacggcacgtgctaaatctttgaataatattgtcaaattagttgatgatatcgaatataagagtgatgaagataaagatattctaggtgaaatttatgaatacttaattggacaattcgcggctagtgctgggaaaaaaggtggcgaattctatacaccccatcaagtcagcaagattcttgctaaactagtgacgatggatgttgcaccaagtaatacagcattctcagtatatgatccaaccatgggctctggatcattattgctaactgttcgtaatcaattacccgaaacaactcaatcaggagcgattaagttctacggacaagaattaaatacaacgacttacaatttggcacgcatgaatttaatgatgcacgatgtgtcatttaacaatatgactttaaacaatgctgatacacttgaaagtgattggccagacggtcctgatgaagctggggttgatcaacctaggagttttgatgcagtggttgctaacccaccatactcggcaaaatgggataataatgaaacgaaactaaaagacccccgttttagtgaatacggtaaactagcaccagcttcaaaagctgacttcgcattcgtattgcacagtctctatcatttaaacaacgacgggacaatggcaattgtcttgccacatggtgtgttattccgaggcgcggctgaaggcaagattcggcaaacgttaattgaaaaaaattatttagatgccgtcattggcctaccagctaatctattttatggcacaagtattccaactacaattcttgtttttaagaaaaaccgacaagcgaaagacgttctattcattgatgcaagtagtgattttgagaaagctaagaatcaaaataacttgcgagatagcgatgttgataagattgtcgctgcatacaagagtagggaagatgtcgataaatacgctcatgttgcaactttagatgaaatcaaagaaaacgactttaaccttaatataccgcgttatgtagacacttttgaagaagaagaaccaatcgacattggtgaggtcaaaaaagaaattgcagccatcgatttagaaattgcaaaattagaaaaagaatttgcagaaatggaagcacagctcgtatcaacgaaaaaggagtctgattaaatgaaagagcaaaaaaagcaaccagaactccggtttaaaggctttactgacgattgggaacagcataagttgggagacgaagttcgaatagtgatgggacagtctcctaattcagaaaattatactgatgatcctaatgattatattcttgtgcaaggtaatgctgacatgaaaaatggtcgtgttttcccgagagtatggacaactcaagttactaaacaagctgaaaaagatgatctcattctaagtgtccgagcaccggttggagatattggtaaaacagcttatgacgtggttattggccgaggtgttgctgctataaaaggtaatgaatttatatttcaaaatcttggtaaaatgaagtccgacgggtattggactagatatagcaccggatcaacatttgaaagtattaattctactgatattaaagaagctataataagtgtccctgcaattgaggaacaaaacaaaatcggttcattcttcaagcagctggataacactatcgctcttcagcaacgtaagttagatcttcttacaaagttaaaacagggatatttgcaacaattgtttccttctaaagataagtatcttcctagattaagatttaaagaatttaatggtgattggaaacaatgtacgatgggagaaatttttacagagcgaacagagagaagtggagaaggtgaactgatttctgttactataaattcaggtgttgttaaggccagtgagctagacagaaaagataactcgagtaagaacaaatcaaattataaaaaagttgagattggagacattgcatacaattcaatgagaatgtggcaaggtgcgagtggatattctccatacaaaggtattcttagtccggcgtatactgtgattactcctaaaaatgaaattgattcggagttttttgcttatgattttaaacgttttaatatgatacaagcctttaaaagaaactcccaaggtctaacatctgatacttggaatttaaagttccctacactcaaatcaattaagatcaatgttccacattttgatgagcaaagaagaatttctaatactttcaatcaggttgacaacatgttacttcttcaacaaacaaaaatagatcagttaaataaattaaaacaagcttatcttcaaaaactctttccataaaacaaacgtatgtaaaaaggtcgcgaaaaatcgcggccttttttgcttagttcagtgtcatcaagcactgcattattttgtcgttatctttactatcaagctctttgataatatgcagatatgttttttgcgtggttgtcatattggcatggccaagtcttttagccactgatgctagtgaaacacccgcatatagcaaaattgaagcgtgtgtatgtctgagaccatgcacactaatgacaggaatctgtgcttgtttacatttacgttctagataatgattcgctgtatcattatgtgttcggcgcgttctgtcgatgaaaattggttccttttcgggtaaatctttaattaaatgtgcgaattgagttgcgatttgccagtctaatgaaatttttcgaactgacgactgattcttagttgattgaaaaccaccgcggtaatgtttataattccatgttttatcgattgttaattgttgtgttctaaaatcaaagtcagatggcgttaaccctaatgcctcaccaaagcgcaagccagttttagctagtaataaaataaagtaatcccagttaacttcgtcttctagatttaagacaccaaaaagtcggcgtaactcaccctgattaagatatttcattttatggcgtctctgaacaacacctttgataattgctttacgcgtcggatctttctttaaataaccttcgtcaagtgcatcatagattgccgatttcaactgatggtggaaatccattgtcgtttgatgttcgtgcgtcgcagcataatcgtttaataattgctgataggctcgacggtctaactccgacaatagcagcgttggcgcaagtgttttaatctgacgttgcgttaattcatatttatcataagtgacctgcttaatcgcaccgcgcttatataacaccatccattcttcaaagtattcgtgaaaaagatattttctccgcataactaaccactcccatataaaaaatagtgaccaattttggtcactatcaaagtataaataataaatggtcgttaattaacgaattttgtttaagggaagagtttttggagataagattgttttaaaatttttagtttttccactttagactgctggagtgttatagtttgatcgagtttttgaaaaaaatttccaattttcttttgttcagttatttcttttgggacgtaaaattttgcttctttaacatcattagagttaattgattcaaatgttgaccctgaactgattctctcccagtatcctgagtattttattttctccaataaataataaatgaagtctgttcctttaacgctagcaacccctcgtcctataactacggtatattttgttttagccacatctccaacaggtgcacgtacacttaataataaatctcctttttgtgcaattttagttacttgtgttgtccaaactctgggatagacttcaccattttttatatccgcattaccttgtactaaaatccagtcattaggattgtcagtgtaattttccgatttgggtgactgccccattgtaatttttgcaatgccacttaacttattttgtttccaatcacctttaaatttgctgaatcttaattgaggagtaggctgacctgtagaaggaaacatttgttgtaaatgtccccgtttcattttcttaagaagctccaacttacgctgctgaagtgcaatagtatgatccaatttttgaaagaagtctccgattttttcttgttctttaaaatcagataccactgatataatcaatttatttagatccggtagatttacagactgaacagtcgttccggttttaatgattttctttaaaatatatgcttctttcgattggagttcagcgacaaaaaaatttacgtttaatttggattgatcaaaaagcaaagctttgatatcttgattaattgcaacatcaatagtcggtatgcttaaaggaaatcgcttagctaatattccacttctagtaacaattaatggggttccagcatctaccattctagttttattatcaataatcgccttttttgttatcgtatatgttccatttgagacgtatttattcttgatttcttgtgacgacaaccagactatatttccattccaatactccgggttatctttaaaaggtgttgccccaccaattaatttaattttggattgaaattccacttgttcccaatcgatagacatggttgacaaaatccgtaaacgctatttagactaatatttattactgttatttgaataaatgctttcttatacacagcgatagcatttttaagggcaaatatattatctctttgtgatttagcgtaaaataaaactagatagaattatggattaaataggagtgttacttagatgacaattgaaactgattataagaacttaaagctatgcaaacatggactaccaacttgggatgcaatgttgccagttgcattatctgttgctagtaaacagtcatctgcgattagacgaaaagagttttcggaggcaattgtaaacagtttgcaattgcctgataatctacgccagttaaagtcagaaaaataccctgacgtcaatattatagatagtcgaacgacatttcctatttcagaattaacaattggtggtttaatagaacggccaaaaaggggattctatttaattacaccgttgggtaaacaattactcgagcaatacggcggtaagttaacttctgagataatccacaagctaccacaatttatccaacaccaagacgagttaaaacaaaaagggaatcttgaaaaaactgaagatagtcagtcgacggataattcagattcggttgaaccgatacaaactgtagaccctattgtaaaggactataatgacaccgttagtattgatttacttgatcgtattcgtaaaggaacgccatacttcttcgaaaaattagttgtcgaattactaagcgcaatgggttacaaaggaacaaacggtcaagcttttgtgacgcaaaagagtaatgatagcggtattgatggtattattaatcaggatgccttgggaactagtacggtttatattcaagctaaaaggtatcaagtgggaaacaacgttggtcgaaatgagatgcaggcattttttggggcgttgagtggttttggatcagaccgtggtgttttcataacaacctctaatttctcgaacggtgcaattgagtatgcaaagaaccagcatattgtattgattaatggcgtacggttgagcgacctgatgctgcaataccaagttggtgtgaatgttaagaagcaatatacaacatttgatatcgatgaagacttttttattgaagatgattaatcaatgaaatggagctgattttcaatgcgtaatccactgactaaatttgaatttgcaagtcatggttattttggcccgcatgaagtatatagtcttgatttagaaactggtttgatgattggcagaatggtaacgtatgaatttattcaccctgaagaaattaggtttcaattggatgcagatactatccgtcgggttcgtaatcgactttcaagattgcaacttccgaagtgggctgactattatattaacgagtctatcattgatggtgagcaatggtcagtaaccgcgacctatgcagacggaacagtgattgagtctggtggctctaatgattatccgcctcgctttgggacagttagaaatttgtttaaaccagttcaacaacagtttttaaaagattagatgtgtaatgaataaagccttagggattagtttttcaagctaatccctaaggctttatttttatgagtgctttagttattctcgtagtatcttctccatcgtcttccccttagccagttcatccaccaacttatccagccagcgaattttttgcatcagtgggtcttcaatggcttcaacgcggacgccgcaaaccacgccggtgatgagaacgcaattcggattcatttgaggagcttcctcgaaaaacgtttggtaggggatgtcttttgcgagttgggcagcgagttcggtttgtgagtagccggttagccagcagataatctgattgacttcggcttgggtgcggtttttgcgttcggctttttggacgagcatggggtagattttggaaagagacatgttgaagatgctttgcatgggcatgagaaggcctccttggcagtttagataattaatatatagcatgtaatgaaaatgaatacaaaatttaggtctgagaaagagtgaagttatttttcactctttttcttttgccctatttcttttccgttactttcttgttataatcgataccagttgtccgtgttataatacagcggactaaatgttataacagaggagagtacagatgagtattggcgatattttaacgaagacgtttacgaacatggatattgtgagttcgatcacgtcgacagtgtttattattttattaggattctactgccgcaaacgcgagatcttcacggataaatttgggaagattctgtcaaaagtcgttttaacggttgctttaccagcattagcattcaactcattcatgcaagatattaatgggaagactttaaaagaaggcatcaacgttttagtttggggcttcttgatctatattattttaattttaatttcaaaaccgttatacttacgttttaagggtgatcaacaagatacattacgcgtgttgaccatctttggttcaacaacgttcttcgggattccaattgttggcgccgttttcggagctaaaggggttatgtatagctcaattttcaacattggttatcgcgtgttcttatactcatatgggtacatcaagatgagtggcttgaagatggaatcgaagaacttgaaaaacatgttcttaaatccaatcgtgatcgccacatttgcggggttaatcatctggttaatccaaggcgcattaccacaagtggcggttgctgggcattcagtggccttcttgcgaattgatcaaacagcgccatggttgttcaaaccaatgacgtacttagctggtttatgttcaccattagcttggttagcaattgggacaacacttggcgaaatcagtttcaaagaagctgcttcggacaagacatcgtggatttatagtattaacaaagtgattttagtacctgctttaaacatcgtgttattggccatcttaacaatgacccacattttaccagttagctatatcagtttggcaacgattgtcatcatgatggcaacgccaacggcaacggtcgccgctgcttacgcgattagttttgacaaggatgcggtcttggcatcgaacgcgtcattattatcaacggtcttagctgttgtgatgacgccagtctggttagtgattttagaagtgatcaaccaaatcgggattttctaggaagagggaaattaaatgtttaaaattgcttgttacggcgttcgtccgaatgaagtggcgacgttcaataaatataacaactacgattatgatttaacgttaattgaagacttattgacgcacgacaatatcgaaacggcaaaaggccacgatgcggtcttgttacgtgcgaactgtgctgctgatgcgcaaaacttagcgaagttgaatgaatacgggattcgttacgtgtttacccggacagtcggttacgggcatatcgatttggccgcagcaggcaagtacaacatggaagttgctcgcgtgccagcctactcaccaaacgcgattgctgaattggcattgacgctagggatgtcattattgcggcataccacttatacaacgaatcggacagcccatcatgatttccgtgtgagccctgtgatgttcagtaaagaagtccgcaactgtacggttgggattatcgggactggcaagattggctacaccgaagcgaagttatacaaaggcttaggtgccaaggttgtgggttacgacttatatccatcagaaatcgccaaggaagtgcttgattttgtcagcttggatgaattattggcccaaagtgacattgtcagcttgcacattccatacttcgctggtcaaaacgaccaattcatcaatgcggacttaatcgcaaagatgaagaacgatgcaatcttggtgaatacagcccgcggacaattgcaagataaccgtgcgattatcgatgctttgaaagctgatcaacttggtgcattcgccgctgacgtgttaccagctgaaggcgaaatcttcttcaagcaattcccagcagatcaacctgttccagatgcaaccactcaagaattgattgatttatacccccgcgtcttgttgacgccacacgttggttcgaatactgatgaagccctcaagaacatggtcgagattagttttgaaaacttccatgaaatcttgacgacgggtaagacgcaaaatagcgtcgcaaccactgaaaattaaagcggttgtttgtattttcatgaaaaatatggtatattgttatcagtaattagatacttcagagcgagtgagcagaaatgctcactctttttattggagcacgtctaatctgaaatataaaaatgaattggagggaatcatttgagtaccgttgtggaaacagttcacgatctgattgtgccgattcttgatcaacaccattttgaattagtggacattgaatttgttaaagaaggtagcagttggtatctgcgcgtcttcattgacaaaccaaatggcattgaccttgaagattgtgccttagtaaacgatgcgttaagtgagaaactggattcaatcgacccggatccaattccgcaggcttatttcttagatgtttcatcacctggtgcagagcgtcctttaaagaaggaagccgatttccaaaaagcacttggcgaatacattcatatctcgttataccaagctgttgatggcgagaaaatctatcaaggtacactaaaagcccttgatgatgacactttaactttagtgattaaaattaaaacgcgtcaaaaagaagtaacgtttaatcgtaaggaaattgccaaagctcgcttagcaattgaattttagtaaaggtaggctagttacatgagcaaggaaatgttaggtgcacttgatgcgctagaacaagaaaaaggcgttaaaaaagagatcgttattgaagcccttgaagcagcacttgtttctgcttataagcggaattacggtcaagcacaaaacgtggaagttgaattcgatcaaaagaagggtaacatccacgtctatgctgtcaaagaagtcactgacgaagtgtttgattcacggcttgaagtgagctaccaagatgctttggaaattaacaaggcatacgaagtgggcgatacaattcgttttgaagtcacaccaaaagacttcggccgaattgcagcccaaactgctaaacaagtgattatgcaacgggttcgtgaagctgaaagaagtatcatttacaatgaatacagccaatacgaaaacgaaattatgcaaggggtcgttgaacgccgcgataacaagttcatctatgtcaacttaggcaagatcgaagctgttttaagcaagcaagaccaaattccaaacgaggaataccaagcacatgatcggattaaggtttacgtttcaaaagtggaaaacacaactaaaggcccacaagtctttgttagtcggacacaccctgatttagtgaaacgtttattcgaacaagaagttccagaaatttatgacggcaccgttgaaattgtctcaatcgctcgcgaagctggcgatcggacaaagatggctgttcgttcaacagaccccaacgtcgacccagtcggcacctgtgttgggcctaagggacaacgggttcaactagttgttaatgaattacacggtgaaaacatggacattgtgaagtgggaagaagatccttcagactacatcgccaatgccttgaatcctgccgaagtcatcgctgttcaatttaacggtgataacgaacatacatgtacagtcatcgtccctgattatcaattgtcattggcaattggtaaaaaaggtcaaaatgcacggttagctgcgaagctaacgggccacaagattgacatcaaacctgaatctgaagtcgaattcgttgatgaagacgacagtcaagatgaaggtgcagtcgttgaaggttttgaagaagaaacaacagaagctgttgaaggcttcgaagaccaagcaacggattctgctgttgattctgaagaacaaccacaagaataagtgaggtgttcatgatgaaacaaagaaaagtaccaatgagaaaagacgttatttcgcaagaaatgaagcctaaaaaagaaatggtgcggattgtaaagactgccgaaggtgagattagtattgacccaactggtaagaaatcaggtcgtggcgcttatgtttcactagaacctgatgcaatcaagaccgcccaaagcaagaaaattttagaaaagacgtttgggattgacgttgcagaatcattttatacagaattattcgaatatgttgatcatcaaaaggctcggctagaattatttggagaacgaaaatgagtgaacaaccagaccgtttattacaactcttaggtatttgcatgagagcacggcaactggtcagtggtgaagaacaagtcctaaaagccattcagcagcaaaaagcgaaattggtttttatcggctcagacattagccaactgacacagaagaaattgactgacaagagtcatttctacgaaatcccggaaacaaaagcgtataccgcggcccagctaacccaagcaattggattacatagagccaccatcgcggttgttgatgccgggtttgccaaaaagatgataacgctactgggataataaaggagcgtgaagatatgggtaaaaaacgtatctatgaattagcaaaagaaattaacgttgccagcaaagatcttttagaaactgccgttaaaaaaggttacgatctaaaaaatcacatggcaactatcgatgacaatcaagaaaaagctttgagagccatcttccataaggaaacaaaaccagctgctacaacaactgacagcaagccagccggtgcagcacctgctgcaccaaaggcaagcgaaaaaacagataacggtaagattaagattaacaaagccgctatccgtcgtcgtccagaagctagcagcaaaccagcacctcgttcaaacaaccaacgcccacaaggcaaccggaatggccaagcagcaaatggtcaaaaccgcaacaatgccaatggtcgtcctaacaacaataacgcccgtcctaataatggtcgccctaacaataatgcggctaaccggacaaacggcaatacgcgtccagctgggtcaaaccaaccattgagcttgcaagaacaaatctcacaagctaatgcacgtcgtcaaagaacgcaagaacgcattcaacaacaacgtgaacaacgcgaagcagacgaaaagaaacgccgtcaacaaagtaaccgcccacggccagctgctaaaccaaacggtaataacagcagtcgtccagccggcaacaagccagccggcgcacgcccaacgacaacaaataatcgtcctgcaaacagcaataacaacggccgtccagcaaacaatacaaacagccgtcctaataacaactcgaaccaaagtcggccagtttcggcacaagaaatgcaacaaaaaatgcaagctaatacggtgagtgctgctaaaccagcatcaaacaatacagcaagcaagccaaagaactttggtccagataagaaacgtggcggcgggtataacagctacggtaacaatcaacaacgtttcaataagaaacgtaagaagacccgtaagcaacaattagctgaacaaaatgctgctaagaaggaaatgccacaacgtaaagaacggccattaccagaagtattagtttactctgaaggcatgaacgttgcggacatcgctaagaagattcaccgtgaaccagctgaaattatcaagaagttattcatgttagggattatggttaacatgaaccaatcacttgataaggatacaatcgaattattagcaacggattacggcatcgaagcagaacaaaaagtggaagtggatattgctgatatcgattcagtatttgaaacagaagctaagagtgatgccaaccttgtgagccgtccaccagttgtcacaatcatgggtcacgttgatcatggtaagacaaccttattggataacttacgtaacagtcacgtgactgatggtgaagccggtgggattacgcaacatatcggtgcttaccaaacgaagttaaacgatcgtttaatcacattcttagatacacctggacatgcggccttcagtaacatgcgtgcgcgtggtgctgatatcactgatatcatcatcttagttgttgctgctgatgacggtgtgatgccacaaacaatcgaagccatcaaccatgccaaggctgctaaagccccaatcatcgttgcggtgaataagattgataaaccaggcgcaaacccagatcacgtcatggaacaattgatgggttacggccttgttcctgaagactggggtggcgataccatctttgttaagatctcagctaagactggtgaaaacattgatgaattacttgaaatggtgcttcttgaagccgacgtgcttgaattgaaggctaacccagatcaaaaagcagttgggacagttatcgaagcccgtcttgataagggtaaaggacctgttgcatcactcttgatccaacaagggacattgaagattggtgatccaatcgttgttgggaatacctttggtcgtgtccgtgtcatgacaaatgatcgcggtcgtcgtgtgaaggaagtcttcccatcagaaccagttgaaattactgggttaaatgatgtgccacaagcagctgaccgttttgttgtctttgaagacgaaaaaacagctcgtgctgctggtgaagaacgtgccaaacgtgcgctcttgaaggaacgtagccgttcaaaccctgtcacattagataacttgttcgaaactatgaaacaaggcgaattaaaagaagttggcgttattatcaaagccgacgtacaaggttcaacagaagccttggctggtagtttacggaagattgaagtcgaaggcgtgcgcgtgaatattattcatgaagccgttggtgcgattaacgaaagtgacgtcacattagctgctgcaagtaacgccatcatcatcgggttcaatgttcgcccaacaccacaagctaagattcaagccgatgctgaacaagttgatattcgtttacaccgaatcatctacaaggcaatcgaagaaatcgaagctgctatgaagggtatgttagaaccagtttacgaagaaaaagtaacgggtcaattaactgttcgtgaaacatacaatgtttctaagatcgggacaattgccggttgtatcgttgacactggcgttatccaacgtgatagtggtgtccgcttaattcgtgacggtatcgtgatttatgaaggtaaactttcaagcttgaaacgtttcaaagatgacgttaaagaagtcaaaactggctttgaatgtggtgtgacaatcgaagattacaatgatattaagattgatgatcaaattgaagcctacgtgatggaagaagtacctgttaaataattaatttacaggaggacaagcaatgaaacatcgtgttggtcgggttgaacaagaaattcaacgcgaaataaatgacattttattaaaaagagtgcgtgatccccgagttgaaggggttacaatcactgatattaatctcagtggtgacttacaacatgttaaagtttattacagcattttatctggcttagcaagtgacgctgaaaagacacaagctggcttagataaagctaaaggattgattcgcagcgaacttggccaacggattaagttgtacaagattccagaaatcacctttgaacaagacggttcagtgcgttatggtgaacatatcgacgaacttttacgtaagttacacgaagatgaagcacagcgttaaactgtgaaaaagagccccgcgaaagcggggctctttttttgtttgaatgaccttatggaaacgataatctattaaattgacttagtcgtttgtaccatattactattctttcaaaagttgattaaatatcgaccgttaaaatatatcgtccaacgctatcggcggcgaattgttaagcgttatacagaggccttatcagtatctaatcgctggttgcagttttattattatcaacgagaaatatcccacattattccacagattctttattatttagaggctaactcggcattagaaacgattgatgatgcgattgcttatattgatagtcagccggttagttcagagctgtatcaaaataacttaagcgagtttcgtaaatatgttaagcagtttaatacaatggtgctgagtacagcgaacaacctgggacaaccgtctagtcgacagattaattttgtcacgcttgatgggataccgaatgtctggtattttggcaccgaccccgaagcgccgaaagtcagtgaactcgatttggggcgagccgcaatttttacgctaccgactagtgaagaattgtgaatcacgagtaaccggctcaaggtataccgaactcagtatcgttttagtgatatagcagaggcctatcaaaaacaagtaccaggctatgttgagagtttatccaaagaagaacaggaaaaagagattatttttgcgatcgaattaaaaagtgctaggatcgatagtcggtttcaaaataaaggactcactttttctgagtaaaaaaggttactaataaaacaacattgagcgaggatgggcaagagtttcttttgtcccatctttttttgtgctttgataataaattgagcagcatcataaagctaatcccgttcgacttcacactctatgctataatagtttagttaatacttaaaggagattacttatggacggcattgtacccttatataaagaacgcggcatgacgagtaacgattgtgtgtttaaagtgcgccgcattttacacatgaagaaagtgggccattctggcacgttggatcccaacgtcgatggggtgttaccaatctgtatcggtcaagcaacgaaggttgttgatcaattggtgcattctggtaaagtctacacgggtgaaatcacccttggcttatcaacaacgactgaagacttagatggtgaagtcgttgaagaggcgcgcttaacagaacctttttcaactgagagaatcaaagagaccctcgctagttttctgggcgattcaattcagattccccccatgttttcagcggtgaaagtcaatgggcggcgtttatacgactatgcgcgcgctggtgatccagtcgaacggccacaacgttcaatcacgattacgcagtttgatttggatggtgaaccacaatttgacgcagaatctgggcgccaaacattccggttcattgtcggttgctcaaaggggacttatatccgcacattagctgttgatttcggtcgtaaactcggtttacccgcagtgatgtccgatttgacacgtcttaagagtggcggcattcaaattggtaactgtatcacgttggaacaattggcgcaaaaagctgaagcgggcgaactggcagacgttttattgccaattgaccatgtatttgaagattacaagaagattgctttagacgacgatcaatgggccaagcttttaaacggtgtgttcttgacattgccagaacaaaccgatgagattgtggcgttgacctatcaagggcatatcaaggcgctctatcaagttgaaaaagcagcgcaacatctttatcgcccttataaaatgtatttacaaaatcaagggactcattaaaaaaaactaggtgaaaaatatgcgtgtcattgaattaattcatccatattcaaaagaacaagtgccagctgaccaagtggtcttggcgcttggcttttttgatggcgtacatcgaggccatcaagctgtaattcggaaagcaaaacaaattgcagttcaaaaaggtttactattagctgtgatgacgtttgatatccatcctgccattgtttatcgcaatgccgatcgggagtcattccgttatttatcaacggttgagcgcaagcaagaattgatggcggagttaggcgttgatgttttctacatcgtgcactttaatgaagcatttgcacaactagccccacaaacatttgtcgatcaatacttagtcgctttacatgcggatacagtggtggctggctttgattacacttatggtaaaaaagagattgcgaatatgacgacattgtcagactatgccaaagggcgctttgccattgtgacagttgcagaacatgaccataatggtgtcaaaatcggctcgacattagtacgagaggatttagatgctggtaagattgcggaagctaatgaattactcggttatgtttaccaaacgaccggtgaagtagtgcatggtgaagcacgcgggcgagaattagggtttccaactgctaacatcgaatcgcaacgaccagaacgattaccaggaattgggatttatgcggtccgctttttagtgcgcggtcaatggtatattggcatggcttcaattggtcggaatgtgacgttccacagcaataacccggtaacggtggagattaacttattagatttcaatggcgatatttacggtgaacaagtgaaagtggattggtatcactacttacgcggcgaagtgaagtttgactccgcggaagccttgattgaccaactccaccaagacgaagccgatacccgaacttattttgagaaattagaggcacaacattaatggcaggcgcttatattcacatcccattttgcgagcatatttgttactactgcgatttcaataaggttttcattgaaggtcaaccggtcgatgattatgtcgatatgttgattcgcgagtttcaattagtgatggcagaatccccagacgaaccaattgatacgatctatgtcggtggggggacaccaactactttatcaccagcacaactccaacgtttaatcgatgggattcatcaatacttaccttatgagggtggtgagtttacgtttgaagccaatcctaatgacttacaagatactgaaaaattgcaagttctgaaggacaacggcgtcaaccggttaagtattggcgtgcagtcgtttaatgatcagattttaaaacagatcgggcggattcaccgaagtgcggatgtttatcgggcaatcgataacgcgcgcaaggtcggcttcgaaaatatgagtatcgatttgattttccgcttaccacaacaaagtgaagcggatttcatggatagtttgaataaggcaattgaactcgacttaccccattattcgacgtactcattgattctcgaacgcaaaacaatcttctataacttgatgcgtcaaggcaagttgcatttaccatcgcaagatgttgaagcacatatgtatcaagccgcgattgatagtttcaagcgggctggcttagatcaatatgaaatcagtaattttgccaagccaggctttcaatctgcgcataatctaacttactggcgcaatgaaaagtattttggctttggtgccggtgcttacggctatttaggtaaggatcgttaccataacttcggcccaattcaacaatacctagaacccttaaaagaaaataaggtgccagtcattgaacgccatgttctgccactgaccgaacaaatggaggaagaactcttcctcgggttacggacgatgcaaggcgtatccatcagtcattttcaagataaattcaattatccattacaaaatgtttacggcgaaacagttgccacccaaattgcaaagggctacctcaaacaagaaggcgattggttaagactaactgaatcaggtaagttcttaggcaatgaagtcttccaagagtttctgctagatagttattgagtgcgttcaaaccgggggatattctgagcattcgccttgtgtcgctaggcacaggaatatggtttgaaaagcacgttataaatattccacttcataaagcgagtctcttccatctaagaagcggctcgttttttattttgtcctttggtccagtaaggccctccgtctaaggaccgattttcagtaaatccgtaaaaaagccggtacgtttcttgactttatttgacgttcttgctatattaataattgtaattagcactcatgatattcaagtgctaaaaagaggtgatgacatgctgaccgaaaggcaattaatgattttgaaagaaattattcgtctttttacagagagtggtcagccagtgggttctaagaagttaatggcagaattgccggtacacgttagttctgcaacaattcgtaatgatatggctgatttggaaagtgtcggtttaattgagaagacgcattcgtcatctggacgggtaccgtcgatgcaaggctatcgctactatctagaccatctcatgcaaccagcaaccctcaatccggttgatgtggcaacggtccaacaatcatttggacagcactatcataagattgatgaaatcgtctcacaatcggctaatatcttatcgaacctaacgagctatacagcaatcgcgttaggaccggaagtggctgagattcggttaactggttttcgtctagtaccgttgagtaatcaccaagtgatggcgattatcgtgacgagtgcagggacagttgataatcaggtatttaccattccacaagcgatttcgggtgatgaactcgaaaaagccattcgaatcattaatgatcacctaattggcttaccgttaaccgtggttagtcagaagttaaagacggatgtaccggcgctattagcccagtacatggcttctccgaccggctttttagacatcttcgacgatgttttgaaaaaggcgagtcaagagcgcttatttgttggcggtcagatgaacttgttgaatttttcagagttctccgatgtcacccagctgaagtcgttgtataacatgattaatcgttcagatgatttagccaagttgctagatttgtcccctggaggcgccaatagccaagttcaggttcgcctgggcaccgagatggccaacgatctgttgaaacattatagtctaatgactgttaattatgacgttggtgaacacggacagggagtcattgcactactgggccccactagcatgccctattcgcggatgattgggttactcgatttattccgtgaagagttagcgaagaaattaattgattattatgcgaattttgatgatgatcaatcttaaaaggagcgtgtttgtttgaccaagcaagaaaaggctgagaaacaagaaaagccagtagcagaaatgccagaaacagaaacacctaaagaagaaacgccatttgaacctgaattagaagcagatgaagtgatcgaagatgctgcacctgacgaagatgcagctaagccagatttagcggctcaacttgctgaactccaaaagaaatatgatgatttagaagatagtttcttacggtcacaagctgaaattaaaaacattcaaacccgtcatcaaaaagaacaagctagcttgttaaaatatgatgggcaatcacttgcaaaagatgtcttacccgttttggataatctagaacgtgcgttggcaactgaagcaactgatgatagtgctgagagtcttaaaaagggtgttcaaatgacatacgatcatatgaaacatgctttagaagatcatggcgttaaggaaattgaggcgcaaggacaagcctttgatccgaccattcatcaggccgtgcaaacggtcgctgttgatggtgatcaaaaagcggatactgttgtacaagtcttccaaaaaggctactacttgaaggaccgcgtcttaagaccagcaatggtcgttgttgcacaataaattaaactaaaaatctaaaaaaagagggtattttttatgagtaaagtaatcggtattgacttagggacaaccaactcagctgttgccgtattagaaggcggacaaccaaaaattatcacaaatccagaaggcgcacggacaacaccatctgttgtgtcatttaaaaacggcgaaatccaagttggtgaagtggcaaaacgccaagcaatcactaaccctgatacaatcgcatcaatcaaacgtcacatcggcgaagcaggttacaaagtaactgttggcgacaaatcatacacaccacaagaagtttcagcaatgatcttacaatacatcaagaaattcgctgaagattatcttggtgaagaagtcacagaagctgttatcacagtacctgcttacttcaatgattcacaacgccaagccactaaagatgctggtaagattgccggcttagatgttaaacggattatcaacgaaccaacagcttcagcattagcttacggtttggacaagacagaaacagacgaaaaagtcttagtttatgaccttggtggtgggactttcgacgtttctgttcttgaattaggcgacggtgtcttccaagtattatcaacaaacggtgatacacatttaggtggggatgactttgatgaagccatcatgaactggttagttgaaaacttcaaatcagacaacggtatcgacttgtcaaaagacaagatggctatgcaacgtctaaaagatgctgctgaaaaagctaaaaaagatttatctggtgtgacaagcacccaaatcagcttgccatttatctcagccggcgaaaacggtcctttacatttggaaatgactttatcacgtgctgaattcgataagttaacatcagacttagttgaccggacaaaagcacctgttatgaacgctttgaaagatgctggtctagaatcaggcgacatcgacaaagtcatcttaaacggtggttcaacacgaattcctgctgttcaagaagctgttaagaactggacaggcaaggaacctgatcactcaatcaaccctgacgaagctgttgctcttggtgctgctgttcaaggtggtgttatctcaggtgacgttaaagatgttgttttacttgatgtgacaccattatcattagggattgaaacaatgggcggtgtcttcacgaagttaatcgaccggaacacaacaattcctacaagcaaggcccaaacattctcaacagctgccgacaaccaacctgccgtagacatccatgtcttacaaggtgaacgtccaatggctgctgataacaagactttaggccgtttccaattaacagatattcctgctgcacctcgtggtgtgccacaaatcgaagttaaattcgatattgataagaacgggattgttaatgtttctgctaaagaccttggcacaaataaagaacaaaaaatcactatcaagagtaactctggtttatcagacgaagaaatcgatcgcatgatgaaagaagctcaagaaaatgaagaagccgacaacaaacgtaaagaagaagttgatttgaagaacgatgttgatcaattaatcttccaaacagataagactttgaaagaacttgaaggtaaagtttctgacgaagaattacaaaaggctaaagatgctaaagaagaattagtcaaagcacaacaagaaaacaaccttgaagacatgaagacaaaacgcgatgcgttgagtgaaatcgttcaagaattaacagttaagttatatcaacaagcacaagaagcacaacaagctgctggtgctgaaggtaatgcaactgacggtaagtctgacgatggtactgttgacggcgacttcgaagaagttaaagacgacaaataataatgcgttttaaaaaaagccaaaacctagtatggtctagggccttggctttttttaatcagtcaattatgctatccttgataggatagatttaacgcgtaagtatatgaatggaggcccacaatggctgataaaagagattactatgacgtcttagggataagtaaagacgcctcagatgatgagattaaaaaggcctatcgtaaactttcaaagaagtaccatccagatattaacaaagccccagatgcagaagccaagttcaaggaagtcacagaagcgtatgaagcattaagtgacccacaaaaacgggcagcttatgaccaatacggtcatgctggtatgaacggtggtttcggcggcggcgcaggccaaggcttcggtggcggctttggtggtgctgaaggcttcggcggtttcgaagatatctttagttcattcttcggtggcggcggtgctcggcaacaaccaaacgctcctcgtcaaggttcagatttacaatatcggatggatttgaagttcgatgaagccattttcggcaaagaaaccaagatttcttataaccgtgaatcagaatgtcacacgtgtcatggctctggtgctaaaccaggaacaagcgcccaaacgtgtcacaaatgtcacggtgcaggtcaagtccaagttgaacgacaaacagctttcggccgcatgatggctcaagaagtctgtgatgtctgtggcgggactggtaaagaaattaaagacaagtgtgaaacatgtcatggaacaggtcacgaagatgaacggcatactgttaaggttaaagtgccagcaggtgttgaagatggtcaacaaatgcgtcttcaaggccaaggtgaagccggcacaaacggtggcccttatggcgatttattcatcgtcttccgcgtggcaccaagtgctgaattcaagcgcgatggcgcacaaatttattcagaagtcccaattagctttgtccaagctgctctaggggatgaaattgaagtcaacacagtccatggtcctgttaaactaaaagtgccagcggggactcaaacgaataccgtcttccgtctacgtggtaagggtgcgcctaagctccacgggacaggtaatggggatcaaaacgttacagttaacatcgtgacaccaaagaccctcaacagtaaacaacgtgatgcgctaaaagcatttgcagtcgcaagtggtgactcagttaacccacaagacaacaacttgttcgacaagattctgaacaagaaacataaaaaatagaagtgcgtcaaaagtggttatcctgtgaggattagcctaacagggcgaatgattgctgtaagcaatcgtttgacttgtgtagctaaccggaataggatgcttttgaaagcacgttaaaaatagaagtgcgttcaagccggttatactttgaggactagcctagtttcgtgaatgagcgacggagtcgatcgtttgcgggacgtagctagccgcagaagtatggtttgaaaagcacgttaaaaatagaagtgcgttcaagccggttatactttgaggactagcctagtttcgtgaatgagcgacggagttgatcgtttgcgggacgtagctagccgcagaagtatggtttgaaaagcacgttaacccccctctaatccacaagattagagggctttttttgttggagtggataggtgggagatttttgaaaaattctgttataatggcggtaataaattaggacggaaggtgagttgcatggatgacaaagacaaattagaacttgaaattgcacgccttaagatggaaaatgagaatttacggttgaaagctgaggttgaacagcggaagaataataagtactggttgtgggcattagtgccaattgtcgcgattcttgctggcaacatgacctcattttcacgtatgttcatgcatttttgtagatagttcacgatagattgcatagaaataggcgttaagcagattatgaaaactgcttaacgcctattttttattggcgactgtgacggtagccgtaactgaagtaaattgttaggccaatcaccaaccagattaagaagacaatccaagttgttagttgtaactgggtcatgagtagtaagcataagccgcatgaaagtaaaggaatccatgggaatagtggcactttaaacccttgtggcaattcattataaaatggtaacttgcgcaggaagatcacaccgagagaaacagttgcaaaggcgaataacgtgccaatgttgaccaattcagcaatcttatcaagtggcactaccattgcgacgatgcttgtgacgatggcgaaaatccatgtattcgcaactggcacatgtgtttttgaactgactttggcaaaaacgggtggcaatagcccatcgcgactaatggcgaagatcagacgtgttccgccgtaggtcataacgagtaggacagttgtcataccggcaactgctcccagggcaacaatcccagcaacccagttttgatgcatcaattgaagcgcaaaagcaacggggtcaccaacgttgagttttgtatagtgcacgacgccaacgaggacggtggcaactgcggcatacaataatgaagcaatcaataatgaagcgataatcccgattggcatatcacgttgcggattgacaacttcttctgatgcggttgaaacggcatcaaagccgatgtaggcgtaaaatgctaatgctgccccagaaagaatgccaccagcaccaaatggtaagaacggtttgaagttggctggtttcacatagaaaatggcaacgccaaggaaaattacgatgacagcgactttcacaccaaccataatcgtattaatccgtgttgattcgcgtaagccatttgatagtaagaacccaatcaataacgtaattaaaccggcaattaaattaataccaccagggtggccaggcgtccatgcagtcgataagaaggtaggtaagtgtaatccaaagccagcaattagattttggaagtaggctgaccaactgacggccactgaggcgactgcgaagagatattcggaaataagtgcccaacctagaatccacgcgattaattcaccgaagacggtgtagacgtatgtgtaggcactaccggccaagggaattgtagaagcgaattctgaataacaaagggcagccattgcgcagacgactgcagcgagcaggtaagacagcatcgcaccgggtccagcatatttagcggcgataatccctggtgtgataaaaataccggcgccgacgactgcaccaacccccatggcggttaaaccaaaggcggttaaatggcgttctagtgtactgtttttaaattggttcacgtcgatttgttttttggcaaagagtgaatgttgtgtcattagtaactcctttttaagtgagatggttctaattttaatcggtctactgagaagtgtcaagataaaaaaagcgccatgacagtgattgagccgtcatggcgcggattagttaagtgattaaattaagccccagtggcgtaaaccttcaataatgccaccttcagtattcttagaagtaatgtatttagccttggctttagcttccggaataccattgcccataacggtgggatagtctacgaagtcgagcattggtaagtcgtttgtaccatcgccaaacgcataagttgggatgtccgttaagttttgtgagcgaatcaattctttaataccggtttgttttgaacaatctttttcaaccgtatcaattgagttcggtgtgttgcggtagaatgttaagtcggtacttagtgtttctgtataggccttgtcattgtcgtttgttagaatcaacatcatgtagactggatgattcaagtaatagtctggatcaacttcggggacgggggcgttgacaaacttgtaggcatctttgccgggttgagttacagccgtaatccggattgcttcttcattataaaaagcgatggcttcgtcagcagcattagcaattgcgacggttttttcaatcacgggcgttggaatagtgcctttataaacaggttgaccttcatattgaatgaagctcccatttaaacaaatgaatgaatcgatgccggtttttgcaagtgcatcttgaatttcaagcggtgagcgaccggtcgcaatgattggtaagtagttgttggcgcgtaattggcggagtgcaatcgcaacagctgcatctacttcagaatgttcgttgtaaagtgtaccgtcaaggtcgaaaaatactagtcctttataagtcaaaatggggcctcctaaataatgatatctgcttaacatgctatcatgcttagcgataccatgcaaacgggaaccgtgatgcgtttgattttcatcacttcttcatatattattcatccgtaattggtttatctactgtataatatagacatagcaacgtaaaaagagaaggaattctaatgaaaattttaatggtagaagataacaaatccgtatcagaaatgatgagtatgtttttccaaaaagaagcttgggatgcccatttcgcttacgacggcaatgaagcagtggaagcctttagtgtcgatccagagagttgggacattatcacgcttgatttaaatttaccgggtttagacggaatgcaagtcgcccaaaaaatccgcgagttgtcgaagacagtaccaattattatgttgacggcgcgcgattctgaaagtgatcaagtgcttggccttgaactcggtgctgatgattatgtgacaaaaccctttagtccaatcacactgattgcacggattaaagccttacatcgccgtgctgagttgattgatgaacaagtcgaagcagctgaagaaaacttacaacaagcggctgaaaattcagattttgatgtacaaacaacacactttaagttgagttctaaaacgcgtgagacttatttattggacaaaccaattttagatttaacgccaaaagaattcgatttattgaagacgttagctaaaaatccccgtcaagttttctcacgggaacaattattagaacttgtgtgggattaccaatacttcggtgacgaacgaacagttgatgcgcatatcaagaagttacgtcaaaagattgaaaaagtaggaccacaagtgattcagaccgtttggggtgtcggttataaatttgatgattcagacgcagcgcgcgaatgaagcttatttatcaatggatgttggcatttttcggcgtcattatgacgaccattattattgtggggattgcgtttacgcaatattcgacaaggaccgcttatgagagcacctgggatcaactagaaggttacgcggatgtgattgaacgtgaagctttcaaacaggggtctcaagcggccttgtcgacccaattcattattgatagtcaacaaatcctttcccaacaacacgttgggtttaatttctttaacgccgaaaacgagatggtgtatcctaccccggatcctaaagtttcggtcaagaaacaatattggaaacatttaaagaatggccagattcaacggctgagcttaagtcgtgattcgcaccaagtgaataacaataagcaagaacagttagtggtcttcaaacccgttttttacaataacaaactgatttacgtgattggggtggcagcaccactacaaaccgttaaatctggtttgacaacgatgcgcaagaacctcttgattgcctttttactatcgacaatcggtgggattctgttgagttacgtcttagcacggtatcaaatttgtcggattaatcgcttacgaaatgcgacccacctagttgctgaaggagattttaatgttcagattaagaatcctggtaaagatgaattggatgatttggccaccgattttaatgagatggtgcattcgttgaatgaatctgaagaggaaattaagcggcaagaagatcgccggcggcaattcatggccgacgctgctcacgaaatgcggacgcctttaacgaccgttaagggtctgttagaagggttgcaatatgatgcgattccagaagagatgcgcgccaagagtatttcattaatgcaaaatgaaaccaaccgactcattcgcttagtcaacgagaacctggattatgaaaagattcggactaaccaaattaaattgaacccgcaaacgtttaatgcggtggaagctatccagaatattcaagagcaactcgagaagaaggcgactgaagccggtgatacgctcatcttggacgcccaagagaatgtcccaatctatgccgactatgaccgttttgtccaagtgatgtttaacatcatgcaaaatgccattcagtttacagaaaatgggcaaattacggtgactgcggaagctggtttccacgaaacaatcttaacgattagcgataccggtatcggaatgacggacgaacaagtcaaaaatatttgggaacggtattacaaagcagatccatcacgtaagaataccaaatatggtgaatctggtttagggttggcgattgtccaccaactcgtccagttacattatgggacgattgaggtccaaagtattcctgaacaagggaccacttttaccttaactttcccagatgaaacgattgtgacaagtgaaagctaaaccaatttaaataggcgtcacgacaaggattaaattgtcgtgacgcctattttttagattaaatatgcaattgcgtttgagctggttgggtttcactgatgatttcgccagcgtgcattgagagggtaacagcggcgcgcttgttgagagcctcgtagaagttgtcgctatccattagaatcaggtgggcgggtttacccacttcgagaccatattggtcaaggacgtgcattgcacgagcaccattgtaagtaatgaatcgataggcattcatgatttcagtatggcccatgatttgggttgccagtaggccactatacaacacatcaagcatgttgccatcgcccattgggtaccatggatcttgaatatcatcttcaccaaaagcgacgtttagcccgttggcagtcagttcttttacgcgcgtcaaaccacggcgcttcggataagtgtcaaaacggccaccgagaaataggttgacaagtgggttggcgatgaagtttaaatccgccatttttaacagccgcatcaatttgtacatataggcatcgttgtaacagcccatggcagttgtgtgtgaagccgtcactttgtctttcatccccgtttcaagggcgagagtcgcgactgtttcaagactacgtgaattgggatcatcaatttcatcggtatgtgcgtcgaatagtaaatcatattcttgagcgagttcaaaagcaaacttcaaggattcgacggcatattcgcgattaaattcgaaatgtggaatagcaccgattgcatcaacccctaattgggcagctttggtcattaatgctttgccatttggaaaagaaagaatcccttcttgaggaaaggctaccagttgcaacgtcatccaatccttgacttcttcgcgaacctcgattaaggctttgagcgcaactaagtctggatcagtcacgtcaacgtgtgagcggacgaattgaatcccatggctggcttgtaatttcagtgcttgaattgcgcggtgtttgacgtcgtcgtgggttaaatcctttttgcgttcggaccaaatccgaatgccatcaaacaaggttccagattcattccattcaggctggccggcggtgagagttgaatcgagatggacgtgaggatcaacaaatggcggtaatgccaattgaccatgtccgtcgatgacttgctcattaggatgcggtattagctgtgcctcaattgctgtaatgatcccgttttcaattctgattgactgcaatgattcttgattctcaatgtgcacgttttgaatgagcattttatccaacctcgctttttttattagtgagtataacaatcatgagttgactttggcaagtaagtttaatacaatgcttataaatataaatccttttaagggcagtccagtgaggctgacaaaggagcggttaacaagtacattagtggacctgctctgtctaggagtaggtctttttttaatgcaattaaccaagtggagggtatcaaaatgacaaagcaacaaacaattcatgcagtatccaaggacgcacgaacgatgggcagttgggatttgttcgcaacttggattggtgcaaatgcgaataacggcacttggtttatcggcggcattattgcggcaactggcttgattcaagggtctacgttgttactagttgttggctgtttatcgtacgtcttgcttgcactggcctcctacatggggtatcaaactggtgtgggggcgatggggctaacgcgggcctcatttggcgtgaagggatccgtcttgccatcgattatcaatgtggtacaattcatcggttgggctgcggtgaatacgtatattgcagcaacttcagtgagcttcatcatcaaggaaatcatgggctggtcaggcaacgatgcagccactaaccggatgagcttgattgttgggattctaattatgtctgtcctgcatttaatcagtatttcgctcggtgaaaaatccgtccgctggattgaacgaattggcatcatcttagtgattatcttagtcacttgggaatcaatcattgtcttcaaaatggtaccgttcaaagacttagtggcgtggcgaccagccagcaacttgcggcttgaatttgggaaggcggtcgatatcctagcagcgtttaaccttgcatgggtaaccgctgctgcggacttcagtcgtttttcaaagaacaagaaagcagccacaggctattcattcttaggcgccaatattggcctgttctggtttgctttcatcgggttaacggcgacaattgccacagcgattacgttaaatcattttgacccgaacaacgcggatccaagcaccattgcggccaaattagggttaggtgttttagcgttattagtgatcgtgattaccagtacgacagctaatgcggtgaatctaatggctgcgggatcggctttaaccaatatttttccgaaatttaaattaacgccggcattgtgggtcgtgacgttattggcaacggtgatgacctttattccggtctatgttgcctcatttttaaccactttcgaaaccttccttgatagtattgggatgttcttaggacctgaaatcgcagttttcttggtggattacttcattattagacggcggcactacaatgttggtgcgctcaatgaagttgctggaccatactggtacaccaaaggatatcatctgacagccatgattgcatgggtcattggggtggtcagctacttggtcttaaatcaattcgcgattattcacgcttatacgggggcaacgtttatcgcaatggggctgacagcacttgtttattggttaatgattcaaagaaaagaaaagacaatttaagggaactaaaaaaacgtcttaattaaggcgttttttttaatttttaccacagagttcatataattttcatactttagttttacactatctttattaggaggtgggtcatgttcttcattaaatcaattccagctaatattcggtattatttacgccaatctttgttaatctatctcgtggattgcctctttttaggcgtcatgctgattgcgctgagcttgatcagtttagaacgacatgacctcaaccagttgaaaaagcaattagccaactttaacacaactaaagaggggactaaccccctgacacatctggttcaaagtaaagaagtcttactgggacgctatcaatttatcgcggtagtgctgactatcgttatcgcacttgtgattggtattttgacttggcaagcgtttaagaagatgcgtcaggatatcgatactttcactagtgcgaattggtcgcgacatacaattgtcaattattatacgttaacggcgctttgcttactaatcagcgcaagcgtgacagtgattttaggttggttattagtcaattcctactattggcgcggattagagctgattaatcaacagtggctacaaaagccgttgcgaccaatacaaggtccccgagcatttcaaccgttatttaaaaatcatctgactgactttagtagtcattcgttattgaatccgattttgcatgagagcaccaagcagaatttaaccaatcaagtattcgcccaactatgggcaccatttatcagtctaattgcaccagtctacattattggttggtgccaagttactcgctttaggaaaatgagaaaggcgtgattgaaatgctaaataaacaacccttagcacttggacaggtctattttagtcaaccggagatgattcagcagagccttgaatcacctgaacccccatatgtcattgattatgaggcgcctaagattctaccctttatgtccggttgggataacttgttgcttcctaaaaagcagcttgcaccaacgttaaaaatgttgattgaacagcgtttaaagcgcagtcggagtttattgggcaccgaattaccgccagtcgatcagttctggattcaattgattcgcggtttagcaagccaccagcaactcgtggtggtcaagcatttcttagatgaacttccaccaacggatgctcgccaattattaaatgatgtcagagcggtagcagcgcagtttcaaattatcgtaatcatgacaacgactcaggaattcgtttttaatagttttcaatcgcaggtgattagctaacgtcaaaaaaacgcaaggacaatatatgttgtccttgcgtttttttttgacgattattccgcatcgttagttgctgttgcatcagactcttttttcagggcctttgattttggcacttccgtgaggcttgattgatcacccgctaattctggagcatcggttttaaagagcccaacagtcgattgatcaccattttgcgagaataaactggttgaattagcccctaatttattttgaatatcgacaagctgttgatagccagtcagatagttataatcggcagggttcactggtttaaaactttgtggtgtatagaaacgtaataggttcttttcgttaactgaatccgacaaactcaattcgtggttcacttgtttctgccaagcagcgacttgtttttgcaacctagctgttggttcagttacttctgtcccatcctgattattgtagatggtgccatcgagtactgtgtaatcaggggtgacaaagttatggtttcggaaagccacgacttgatcatgttgtggtgataataaatcggtgccgaattggacgtaatttttattatcaatcccgagtaagtgaagcattgttggtaacgcatcgatttcgccaccatattgtttttggataccgccttttaaaccgttcatgtgaatcatgtaaggcacacgctgtagttgggcgttatcgtagtcggtccacgtttctgggtcgcggcctagtacactgagtaaggccttattatcagaattcgaaagaccgtagtgatcaccatagaggacaatcattgaattatcatagagcccagaggctttaagataattgaagaactcttctagggattggtcaagataatgggcggtcgcaaaatagttgttgaccgctgtattatcagttgtggcacgggggaagtcaccgtctttttcgggtaatgggaatggaaaatggttggtgacggtgatgaatttcgtgtagaacggctgttgtagctgttcgagatacttaatcgattcaccgaataataatttgtccttcaagccgtattgtaagacgttatcaggatcggtgttaaagtaggaagaatcgaagaagtagttgtagccgaagttcttgtagacgttattgcggttccagaaggtgcccacattaccatggaaaacggcactcgtatagtcaccgttttgcttgaggattgatggggcagcttggaaggtgttatccgaaccaagcgttgtaaagactgagccttgtggtagaccgtagacgccggtttccatcatgttttcggcatcactggttttaccttggccaacttgatggaagaagttttcaaaacctaatgtattttgatcatgatagaggctatttaaaaatggcgttacttcgcggccttcgaacttaaagtcgattaggaattgttgaaaactctctaaatgaatgacaatgacgttcttgcccttcgcaacgcctgcgtattcagcgttcggtgcagcgtaatgctctttcataaagtcgagcaccggatctaagtcgtaactctcagcttgggcacgcacttgattattctgagtagtcttgaaagcatcgtagacggtgaaggtgtcgatgccgaggtacttaacgatgtagttccgatcaaacgtccgtgataaaatttgaggtcggctgatttcacttaagccaaggttgatgccaaataataagacggccagtgaggtaatactgaaggcccaccaccgattaaatgcgtgtttgtcgatcttgatgaccttggttaaaatcagcaaggctaagacaataatatcaatccaatacagcgcatcatgccagttcatgagggccagtgaacttttgctgagcccagccgaaacttttgaataccctaagatggtgttgatggtcatgtaatcggtgaattgccggtaatagatgacattaaaatataaaagagcggtgttggcggcatagataatcaagcccaaccaataactgagatgcggctggcgaacataaagaatgatgccgaataaaaggagcgtcgtcgcgaccggattaaagattaaaatagcaatttgtaagaagccactagctgcgaggttaaaatcggtgaagtacccgaataacgtttttagccaaaataaaaagactaacaaactcatgaagcctaatctcgtggataggaatgatttaatttttgtgagtttcaaataatgtgacatcctttcaaaaaacagaactaaaagagcgctaatgccttattttaacccgagggcggcattagcgcaaatagcagtttaaagtttaaacagaaacttaacgtttcgcgggccgcatgatggcatcgtactttggattcagttgatctggcgccaaaacatgttgataaacggcttgtaattcatggccgatttctgtaatactcttagactgcgcagtttggtagccttgagctgttaaatcgggaacggcattagtgaccatcgcttggatgagttgactgaattctgcgttagtgtgacccatgtagcagttttgttgatcggcaagccagccatggtaaaccggaatatcgcgcaccaatactttttgatgacttgcaagggcttctaagacgacaatcccttcagtctcttcataagaagggaagaaaaataagtcagcattggcatacgcgccttcgataatatcgcctttgatataaccagggaagatgacgttgtcgggatgatcctgtttgacaatccggcgaatattggctggaatactgtacatgggtacatctccaaaccagataaaggtgtattcgggtagacctttggcgatttcgacaaaatcgagaagccctttgcgtttaaagaagaggccgacgcagataatcactttttgatcaggctttaaatggaagaaattccgaaaagcagcttctttagctggtgtggcttgatacttagctaaatcaatgccgtttgaaatgggagcgatagggttggttagaccatagctttccaataatgattttgaataaggggtgggggtaattaagtggtcggcttgttgatagaggctaacgaggtaccgtttaacaaatggagcgagttgattggaaccaacaaaggagttgcgaaaatcttcttcggtcgaatgtgcatgataaatgacgggtttccccattttacgcgcctttttgatgacactgcggcttttgagtccgtatgtattgatatgtaagatatcgtaatcttgatcattcggatcaagcgtatagtcaatccccattttggttaacgcgcgtttttgatgatccaacgcccgcccaattccagatttagcgagtagtttttcactttcaaaatataatagaactttcataaaaggctcctgtttcaagttatagtaacttctattatagcatagcacagtaggcacacatcgggctaaagttgggcagtcgatacctaatagtttaagattcactttagtcgagtaattaagcgttatttattgaaaaaaaacagctataatggacttaattactcattgaataatgaacagataggttaaattagtggaataagtgaggttggttttttggtatttcttgggcgtatttatgaacaatggatcctcccttggggggaacagtataatcatttaccactcatcaaattgacggtggagagtttagataagacgattttgtattgtttggtttttattgtgtgccggttggggtacttattaatgaaacgacgcaaaatacagcttctcccagaactgaaactattgttatttgtgttttatattgccttattggtctcattaacggttttacggcatatttattatccgtggcaaatgcagctccatttgcaacgaccacttagccaaattaatttgacaccgtttgttgagactttcaagttacggcaagcgcccgcccagattgattattggtataacttctacgggaacattgcgtggtttatcccgtttggtttattgcgacggtcattgacacagcgcaaaggggattggttgattacgattattgaaggggctctgttatccctgtgtattgaatccgcccagtttgttttagggactggcatggcagatattgatgatctcatgtttaatacattaggggtgatgattggcgtcctgttatatcaagtcctacaacatgcaaagcgaaaacattaaggttatcaacggtaagaaaacgcttatcgttgatttttttactaaaaaaaacgcttttttacgtaaaatttacgtaagcgcaatcacgactgggacagttgcttacatgacggtagtgaaggctggtaacgattgaatggtgccgttttcctactagccagcggatataaaactatgtataatggattcttgtactttagagaagaagaggaatttataaatggctattttaattgcattaatccctgcacttgcatggggtagtatcgggttagtgagtggcaaacttggcgggaatgcctatcaacaaaccttaggaatgacaattggtgcgctggtttttggaatcggtacctttttagtattacaacccgctttaaacttacggattatggtaatcggtatcatttccggtttattctggagcattggtcaaggacaacagttccaatcaatgcaagcgatgggtgtttctaagacagtcccattatcaaccgggatgcaattgattgtaaacactttagcaggtgctttgttattccatgaatggaagacaacgcacgattacatcttcgggattactgcattagtgatcttaatcgctggtgccacattaacttcaatgaaggatccgaagagcagtgttgctgctaaagaagatacacaatttgcacgtggttttagagcattaatcttatcaacaatcggttatggtggttacacaatcatcgttaactggtcacacattggcgcaacatcaattgttttaccacaagcaattgggatgttcgtcggtgctgcaatttttgccggtgttggcattgggacagcagtcttcaataagaaaacagcactcaacattagtactggtttattatggggtcttgggaacttatttatgttgatttcaatgaatgatattggtctagcaattagctattcattatcacaatgtggcattatcatctcaacaatcggtagtatttacctattgggtgaacaaaaaacgaaaaaagaaatggtttacgtcacacttggctgtttattagtcattgtcggtggggtcaccctcggtatgatgaagtaagcaacttactaataagtcacctagacaaattgtctgggtggcttattttgtttagagtgtgtattattctatagaaaaggcaaaagaagtgagtcagatgaagagaacaaataaaacagctgtcagttactatttattgagtgtgctagttcccatgttattaatggtggggctatatgcaatgctccaaatagtgccatttggacggcataatttattgattagtgatctcggtacccaatatatgccctttttggcagagtttaaacggcaaatggcccagatgaatttcagtacgtattcattttcactttcactgggtggcgatatattaccgctagcggcttattatttaatcagtccttttaatttactgctcctattttggtcgaatagccagttgccagtggtggttgggtatgtcattattttgaagattggggcaatgggtttaacgatggcccattttctaaagacgcgtcagcctgaatatcatttttccgcgctaatttttgcaacagcttatagtttaagtggctttgtggcaatgaacttttataacctaatgtggttagacgctctgattttcctcccactggtcatcttaggattagaacggctatttttaaaagggcgtcctggcttatatatctggatgttggttgccactatctttaccaactattacttgggttatatgtcatgtctatttgccgttttgtatgcaattagtttgttaatcaaatggaaacaaccccaacagtcttggtggcaactagtggttcactggcggcaggctatctggcagttttgttgggcctcattgattgcggggggcacaacagcagttgtattattgccgtcgttacttggaatgttgaagactgggaaaaagacaatcgctgcaaccagtttttatccaaccccgcagtttggctgggaagttttgagccaatttcaagtcggcggcagccattatacgcaacgcttaattcatgaaccaactttatttatcagtacattagcgctgttatttgcggtctattatttctgtctaccaaccattcgacggcaagcaaagtggtcgaacggctttttaattgttagtttagcgttaagtttctgggtaacgacatttaatacgatgtggcacatgttccagcaaccagaagggtttccatatcggaatacctatttgatggcatttgttctcatcaaaattgcctatgaagcaagtattgaaccaatcggtaaacgtcaaacgaaacgcctggttattttgatagtcggtggcttgctcagcattggccagttggcgctctactatgggccacatgtacgtggtgtgcagaaacaatcgctctggttgttaatcggactaatggttttggctagcgttatttttgcagcgtggcaaaaaggagcacgttggcaaccatgggtgattggtctgggagccgtattgacgtttagtgaactggtgattaatggccgcttgacgaccactaagttaccgatgggcgatcaagttgtttatgcgcaacaataccaacgccaagcagcactctttgaacagcttgaacggcaaacacctgatttctatcgcgttaataaccaagcgattctcttaaaaaaagcgtttaaggaaccgtattatgggtacaatgatgcgttgacctttggacagtatacattaaacaattattcttcgacacttgatgagcggatgcggacgatgttggttaatctcggtttttatagtaagaatgcccggcggattaacgggattgggcatactgtgctgactgacctactatttgccaatcaatatgacctaattgctaagcaaggacaggttgtgacacaaccccataaaacgttaggcttagggtttgcggttaatgaccagctagcacacgtcgctttgaaagcacatgagccgtttgaaaatcaagatcgaattatgcaagcgatgacgggacaaacgacaccattttatcaatataatcaattagatttacaagcgcaaaaacgtcggcaaattatgtttacaacgcaagttaagacaagtggatatgcttatctatacttgccgcaacaaaacttatcaaagctgaaagtgaaaattaatggccgaacacataaagtaccgattgaattgaatgggaccacgattattggtttgggtcgctatcaaaaagggcaacaactaatgctgacaattaccagtcggcaacctaaagcctttcgtaagattcaggtggctagtttagaccaggctcatttcgatcaagcttttgatcagttggcacaacaacgcttaaagatcgacctaaaacaactgtcggcagataatggtcggattgctggtgtagtaccagctaagaccgctgatcaattactttatctaagtgtgccatatgacagtggttggcatgcgcaagtcaatcatcaaacagttcgtacacgacgagtcatgggcaatatgcttgcagtgccacttgagaaagggactaaccaagttcgcttagtctatcgtgcgccgggactaattatcggcgcgatcatttcaacatttagtttaatgacatggggacttatcttaattaagcaacgccggcattaaaaaagcaggttaacgatgacaatcatcatcgctaatctgctttttattgtggcttatttggggtgtagttgagtggctaagccaagaccaattaaggtcaggccgagcaaactaataaatacgacttggtaaccggcgacacttaaaaggagagttgcaagggtgacgcccagcgcgcccgcaatttgacgaatcgtggttgtgacggcagtgccgtcagcgagcacttgatccggcaggctattagcaccaagtgtaacagcaggcatcatgacaaatgcgttgccgccttcgatgaaacaggcacacaggatcatcaatggtaatgacagccattggtagaagccaatcaaagctagccatccaatgctaatcatggttaggccaacgagtaaggtcggtttaaagccaattttatcagctaaccggcccgcgagtggattcaaaaggcttaacacaacggcagcagggaccaatgctaatcctgaaagaagcggcgtcaacttcaattgagcttgaaaatataatgggtagatgactgtggtgacaatcaatgaaatataggaaatagcagtcaatccgaccgcaatatcgtagttaaggtaaccgagaatatgtaaattaagaagtggcgttgtctgggtgagttgccggtagacaaaataacccagtgctaggcagctcactaatccgataccccagagtccgattgggttgatagtaggatgattagcgctactgatgacatataataaaccgattaatccagttgtacataaaacggaaagaccatcaaggtgatagggcttagccggcataacatcagaaatagtgaagttagctgttgctaacacggttaagataatcagaataaaggcgatgaatagtcctcgccagctgaagtagttgagaataatccctgaaataatcggcccacaagctagtgcagagcccattactaaaccagccaggcccataatttggccccgttgattttcagcagtaatggttaataagacagtttgaaacgatggaaataaaacacctactgcgatggcttccaacgcccgcccgaacaatacccaaccgaactgattagcgaagacaattaatagcgttccaatagtaaataaacttaaaatccccatgtagagtcgtttgaatgggatgttgtttaataaccaaggactaatcggcatcatgacacacattacgagcataaaaccggttgtcagccattgaacagttgtggctgataaatcaaaataggccattaaggttggataagcagttgaaagggcagattggctgatagacattgtgaacgtgccggttagtagggtgaatgtaaatagttttagtgctgttccagatagataacgttggttggacaagtaatcagatcctttttttggcttaccttaactataggacgtcatgttttatttgtaaaatgaaacgcaatttgaaatcgttatcggtaacaaaggctaataattagccttttatctgtatttagtatatatttatactcatgataggtatttagatattatattaaagggggaacgaccatgagtgtcaaagcggatcaactatcgactcaggaatacatcgtacggtggaatcaatttttagaacggtttatcgtgtttgaaacagtatttagtgagtacacccggaccagcaagaacatcatcaaagggcgctgtctggtgggcgaaaatttggaatcgttaaacgaatattttcaacgtaacttacgggtttttaaacaatttattgatcaagccacattactaaacccgccaaaagaattacgagaaattaaccgtcagttacaattagtaatgactgattacgtctcgtccgctgaagccatggtcaccgccttcaacgagggtgatgagttaaacttatatcagaaactcacaacgagccgtcaacaacaaaagagtgatcgaacacgcattagtgaacttttaaatcaaatcgctgtttttaaaacacaggcagtcaaataaaaaaacgacacccatctggcaactctcggccggtgggtgtcgttttttttgactagataattttacgccgagcatgttcgataaatttaaacttatcggcacggtgaatcgattcggtgaattgaaggagggtattatcttgtagatgggtgacacctttaacactgactacggagctgttaggcggtaggttcagtatctgacactgtccttcagtggcgggaatcaccgtgaactccttactgccataaccaatttcgagtttgagtgtttcttcaaagtaacgatagagtgagtcttgtgcaaccccttttgaaatgtgggggactatgctagttaagacgtagtcgttatcgattaccaggggctgaccgttaacgacgcgcagccgttgaatgtaagtggcaggtaactgctcttcggattcaagatggaaaagggtttggggaacggtcgtctgtgttaattgcaagacttgagtgtcagtatgcatatcgaaaagactatctaattcacgataactggtcaatcctgaaatcggaaaagcatacttgtctagaccgagaaccaaagagcctttccctttaattttatggataaagccattttcaagtagactacctaatgctttgcggacggtttcacgcgacgcaccgtagagttcagtgagttcatttttacttggtaagaaagtgccgctttgatagagttggtgcgtaatcttgcgcacgagatctcgataaatcatttcatattttttagccattcgatattctccaatttgttttctcattcctatcaaaacggggattcggtgaagttgcaaggttagattaagcgctaacaagaaaacggttttaaaaagtgttgaaaacttgtacgtacatgatatgtgattacggtgtactgagaaagcgcttttattcatgctacttttaattcaataagattcgggaggaattattatggctcaaaaggattattcacaactcgcacaggcaattgtcgccggtgtcgggggtaaagaaaatatcgatagtttaattcactgtattacacggcttcgtttttatctaaaggacgaatcaaaagcgaagaccgaagaaattaaagcattagatggggtcattaacgttcaaaaggcctctgggcaataccaagtggtcattggcaaccaagtcactgccgtttatgatgccgtgattgcagaaatcgggacagagtttgctggcgaagatgaaacggcccaagttgtggctgcaacaacgcgccaacaaaatttaacgccatggggccatgttaaagaagcctttaatcaattaatcggcgtgattaccggtgcgatgagtccgattgtcggtatcttagctgctggcgggattttaaaaggtgtcttggcgatgctaacgatgccacaacttggcgcgttattaagtgctaagagtgaagcgtacattgtcttaagtacgatgggtgattctgttttctacttcttacccatgttggttgggttcactgccgctaagaaattaaaaggtgatccagttttaaccgctgtcatcggtggtgttctggtgcatccttcattagtggctttaaacgggaaatcattgcttgagatcgggtcattaaacttcccaatggtcaactacacatattcgattttcccaatgattctcgctgcttggttgctaaattaaccaaatgggttaaaggctggttaccaggctacttacaaattatctttacaccattgattgtgattgcagtcgtttctgccattacgctttacatcacagggcctgctattatttggttatcaaatggtttagcattcgggattcaattcttattattaaagagtggttggttatctgggttattaatcggtggattctatcaagtgcttgttatcttcggattacactgggggattttaccaattattgccaacgatgttgccgcaacgggtcacagttactttaacgtgattttaagcacaataatgattgcacaaggggccgctgttttagctgttgcgattaagacccgtaaaacagctttaaaagaattatcatttgctggtgcgatttcagcattctgtggggttacagaacctgctatttatggggtcaacttgaagttccgacgcgtcttcattgccggtttacttggttcagccgctggcggatttgtcagtgggttattccacggtaatatgttcggtttcgcggggtcgtggatcggctttgcatcattcttagatccaaaacacctagcagatttatcaaacttatggattttcatcgcgtcatcagcggttgcaacgattatgccatttattgtaacgctcgtttggggttataacgatcaaatgacagctggtgaagcaatggctaaaccacaaaaaccaggaacagcaaaataaacgactgaaataggagagatatcgcatggcatggtggcaaaaagcaacagtttatcaaatttatccgcggagctttcaagattccaacggtgacggaatcggagatatcaacggcattattcaacggttagattatttacaaaatcttgggattgaattgatttggttgacgccaatgtatgtttcccccggtcgtgataacggttatgatattgcggactattaccacattgatcccatttttggtgatttaaccgattttgaacgactcttaaatgaagcccacaaacgtgggattaaaatcatgatggatatggtggtcaaccatacttctgatcaacaccgctggttccaagagagtctcaaaggcaaggataatccgtaccatgattattatttgtggtgtgatccagtggatggacacgaaccaaataattggttatccaagtttagtggcagtgcttgggaatatgtgccagtacttgatcaatattatcttcacctatacgaaaagagcatgccagatttgaactggcggaatgaacacttgcgggccgagatttttaaaatgatgcaattctgggcagaccttgggattgatgggctacggttagacgtaattaacaatatctcgaaggataaagacttcccgaatgatacgtttaaaacgccaagcgacgatgggcgcaatttctatacgaatggaccacatgtgcacgaatacattcatgaaatgtacgaaaaggtctttggcccgaaccaatttgtcacggttggggaactttcctcaaccccaattgatgaagcgattcgttataccaatccagcccgtgaagagttatcgatagcgtttaccttccatcatgtgaaggttgattataccggtggcaaaaaatggacactaggcgattatcggctgtctgatctaaaacgggtgcttagtgattggcaaacggggatggctgccggtggtggttggaacgcattattctggtcaaatcatgatcagccgcgtgccgtttcgcgcttcttggatgacggtcaataccgcgattaatccactaaattattagcattagtcgaatttggcttacaaggcacaccgtatatttatcaaggggaagaaattgcgatgaagaacgcgaacttcaccgccgttgaccaatatcaagatgctgaatccatcaatgcttaccagcaaatgttgagcgacgggattgatgaagcgttagcgattaagattttacagcagaaattacgcgagaactgtcgaattccgatgcaatgggatcaaacggcgcatcacgggtttacgactgggacaccatggttaatgccggttgagcacgatgattactcagttgccgctaagattcatgaacccaatagtgtctttgcattctatcaagaattagtgcgaatgcgtaagcttatgccagttttaattgaaggggactaccaattatttgaaccagaggacgaagcggtttacacttatcaacgacacctagatactgaaacgattcgcgtgatggctaattttactggtcaaacacaagtccgttcaataccacacgtcaaggacgtgctcatggataattacgaacaaccgcagtttgatggtcagcaaatcactttacgaccttatgaagctatcatgatgcgggtttaagaaaagaggaagaacgatgtttaattttttgaaaaaaggaccagttggacaggtaacagcccccgttgctggcagttatttaccaattgaacaagttaccgatgaagtatttgcaagcaaggcagttggcgatggctttgccattacccctgatgaacggcaaacaacgattagcgcaccaattgacggtgttgttagttcgattttccccactaaacacgccatcatgattacaacaaagcaaaatgttgagattctgattcatatggggattgataccgttgaattgaagggcgcgccatttacgatgcacgttgaagcgggtgatcgtgtcaaggctggcgaagcgattgttgatattgactggcaacaactagcagccgcccaaaaggcaacgactatcatggtcgtcagcagtaacgccacctttgcaccagcagagccactaccaacaacagttacgactgacaccattattggacagttcgacttagcggcagaataggtgggttaagatgcaaccaatcattattgaatctgatgatttcgggatgaccataccgatttcgcgcgcaatcattactggcttaaaaactggcgtgatttctaccactaatgcgcaagtgacatcgcctcattttgaaatgagtgcggcactcgcccagcaacatgggattacggcaatgggattgcacttggttttcgacaaagaccgcccaattagtcagccactgacgattcccagcttggtaaccccggctgggttttgtcatgcttatcaaaccttacaaactcatccaaaacagttggccattactgatgttaagcgtgagtttcaagcgcagattgaccgctttttggcgagtgggttacaactcacgcatttgacatcgcaccattttgtggcaacgttaacgcctgaaatctatgcaattgttctagaactagcgcaaacgtatcatgtccctgttcgcaatgaaacggcgcatttaagaccgacagaacaagcgtcctacctgctattaatatcggaatatgccgttttaacgactgggacgttgataacggcgcaacaaacaccgtatttaacgccacaggaaatcaaacggcaactgacacagaaaaatttggtaggtacgccggtgatcttaagccatattgggtatttatcggcagagttacggcataagagtcgtctgacgacgaatcggctagccgaattcaatgcgcttaaaacattaaagcaaaccaattattgggatcaatttagttggcaactgacggattactcagaattaggagcgaagtagcaaatgacacaatatcaacatttaacggtacttggtgatagcatcacggatcaacgtaatcattacgcacacaaatggtactaccagtggttagcagaatggctcgcgattcccacaatcaccaatctcggaatttcggggtcgacgattgcccaaccgtatgatccgatggttgaacgctggcaagccattcctgaatcaacggatttattattgatttatgcgggtgtgaatgactttggtcgtgatgtaccacttggtcaatttggtgatcagtccacagcaacattctacggcgcactacaaaaattacttggacaaattacgaaacattacccacaagcgacggtttattttatctcgcacgttcatattgggactgacttcttttcggccgtcaatcagggcggttatcagcaacaagattatgaacaagcgatcgcgcaagtgacggacttgtttggcgttcagcatatcagtttgtttaacgaatcagcgttgtcatttgcggatgcacaacaagcgactgagctgagtttagacagtctccatcccaatgatgctggccatgaaaaaattgcccagttcttgagaactaaaattagataagtaaaaaggcgtcgagctaaaagttaactttagcttgacgcctttttttgtggctgaatttaagttagattagaacaaatgatgacgggtttttttagaagagttggccaatcccgtagtgaatggccattgtaattaaaccaattaggatgttccgaataatggagactttgactttgccatcgcccagtttagcgctgataaacgcggtaatggaaaccgcgatggtgacggcaatgattgtgccggtcatcttgtaggcttcaggcagtagaatcattgtcacaagggggaagacgccaccgaaagcggctgagaagagggatgcaaacgctgcggcccacgggttcatataatggccaagctctaggtcatatttaacattaacaattgttgctaaaggcttcttatgcattaagtccttagcgattgcgagtgccgtttcagaagtgacacctttggcttcgtaaaaagcttggacttctttaatttgatcatctttagctgtttttaagcgtgcttgttcaatggcaacagcggctttttccgtgtcactttgcgaactaactgaagcatattcacccgccgccattgaaaaagcacaggctaataaatcagcaagtccagcgataaaaatggtgaaattattggttgttgcggcggcaacactaaagagcacaccgacaacggttagaatcccgtcattagaacctagaacgccggctcgaagggtattcatcttttcttccatcgtttgatggggtttttcagttgttttgagtggggctttaagaggggtcataaaaaaatcctttctaagcgattattgtttgaataatgtcccaatagcgtaagtgactaccatggttaataatccggaaatcacattgcgcaacatggcttttgaacgattcgctttgccgagagcggctgcactgtagccggttagcgcaagggcaatcatcactgcaatgatggtggcttgcacgcgaatggtttggggtaataaggtgattgcggctagtggcaaaatagaaccgattggaaatgagatgaatgacgcaacagcggctgcgtaaggactggtaaaagcagtcgggacaaacccatatttttcacgtacgacagtcgtcaacggatcagcagtcatcatttcgtgtgtagcccgatcggcaagttcaggatcaatcccagtgttgacgtatttttgccgaacaaaagccatctgagacgcataattactgtttaaattcaatttcgtattaatgattgccatttcctgtgcgtctttttgcgtgctgacagagacgtattcgcccatcgccattgagatcgttccagcaatcattccggcaattcccgaaatgaagatggcgaagctattgcttgtagcgccggcaacaccgataacaattccggcgacggataaaatcccatcattggcacccatgacgctagcccgcatcacgttaattttttgggcgagtgataatttttttgacaaggtgaagcctccaatactttttattactttataatgattataattaataacaactttcattttagtcaatttaatttgaaagtcaagtagcaacctagaccaattaaatttgaaaaatggcttgccttcgagtgtactttaaggaatatgctaaagacattgaagaaggggtgattaaaatgagtcgcattttagtattaggggcagccggacaagtggcccagttagttattgagcaactgttgaaagaaaatcaacatgagctcgtgctatatttacggcacgctgaacggctaagcgcattagcacaaaatccacatgtcacggttattgaaggtgatgtgttggatcaagagctgttggcagacagtttagctggggtcgatatcgtttacgcaaatttaggcgggcagttcgaaccattaatgcaaaacgttgtcgcgacaatgactgcagcgggcatcaaacgattaatctatatcagtggattaggcttgtatcatgaagtgccaggtgcttttggtgagtggaatgaacaagcagtcggccatgaagtcatggaagacacgcggcgggcggcgaagattgttgaacaatcttcgcttaactatccattttacgttgtgcctatatgaccaatgaagatcggatcgattacgaattaactgaaaagggaacaccgtttaaagggacgattatttcacgacggagtatcgcgcaagttgttgttgatttagttaatcatcctgaaaaaggaattggggcaagttggggcattaatcagccgaatattgatggcgatcgtcctatttattaaaaaacttgccttatagtatactctaaggtataagctatttttgtaggagggatgtcgatggcacaagagcagtacaaaatcggcgagtttgctaaattagttggtttgtcgacttacacattacgttactatgaagaccaaggcttgattatgccgcaacgcgatgcggccggtgtccgcttttatacattagaggacgttaagtgggtcgggtttatactccatctaaaagggaccggtatgcggattacagaattaaagcaatatgttgcattgcgggctcaaggagacgcgacgattgaagcgcgcaaagctttattgcaaaaaacaaaggctcaagctgaagccgaattggctgagcgccaagcaaatttacagatcctaacgcgtaaaattgattggtatgatggtaaattggatcagagtatcgatcaagcagagagttttgaaacgtatttacaacgatttgaatcctaataaagtgaggttattagaatggttaagaatgaacaattaaaagaaaaacaattattcccagttggagaagctaatgtggcttatcaagacttcttcgtcggtcaaagttatttatcaatgttagtgagcgaaccagacgtgaatgtcggtgtcgggaatgtcacgtttgaacctggttgtcggaacaattggcacatccatcatgctgggtaccaaattctattggtgactggtggcgaaggctggtatcaagaagaaggtaaagcagcacaacacttagtcccaggggatgtgattgttactaaagacggcatcaaacactggcatggggccactaaggatagctggtttagtcatgtcgccatcactgccggcacaccagaatggttagaagctgtttcaaatgcgctttatgacgcactttaattcagaaaggggtttttaaaatggcaaagaaacaaacagcaggccgcgatctattgggtgattttgcacctaaattcgctgaattaaacgacgatgttttattcgggcaagtttggtcgcgtgaatcagagttaccagcacatcaacggagtttaatcaccatcagtgccttgatttcaggtggtaattttgaataattaccagcgcatttaaagattgataaggaaaacggcattactgaagctgaaattgtcgaagtgattacgcatttatcattttatgtcggctggcctaaggcatggtcggcgatgaacgctgctaaagcggcttatcgaccagaataattaatcagggattaggacagataagattgtcctgatcctttttttgatggtatgatagacaaacgaatcagcatcaagaagtggaggaaaggccttgaacgagccacaaaaaaattataccaacggtgttttaatgactttatcagtgattggaatgaaatggaaaccgttgattctctgtcatcttgtggcaggacctcaaagaccggccgaacttaaaagagtcgttcagggaatttcagccaaagttttaaccgatcaattacgtgaattggaacgagatggcatcattactcgaaaagtttttaacgaagtacccccacacgtggagtatgcgatttctgcgtacggcaaatcattggtttccgtcctaggaatgatggccaagtggggcgaagatagaatcgactttttacagagcaatggtgatgatgtgcagttggattatcgagaccatgagaaatacgatatttaaagaaggcgataacatttattcaaaaagaatgttgtcgtctttttagtgatttcacaaaacttactttgaggtgcgttagttagttgaaagtgcgtaattgtttattgcgaagtacccgatatactaaccttatcaactaaaaagtgaggggaaaagaaatgaatgatattcaaaataaagtcgttgtaattaccggtgcatcaagtgggattggtaaagagacggccaccttattagcagccaaaggtacaaaacttgttttagcggctcgacgaacaagtgcgttggcggcgttggcaacggcgttaaccgctcaatacgacactgaggttatttaccagcaaacggatgtgacgcaattagcagacatgcaagccttaatcgaattgacaatcgctaaatttggtagaattgatgtgctattcaataatgctggcttaatgcccgtctcaatgctacgcgatggtaaagtcgatgagtgggaggctatgattgatattaatatcaaaggtgcgctatatggcattaaatatgccttacctttaatggaacagcaaaagagtggtcatatcattaccacggattcagttgccggtcatttcactggtgaaggcttatccgtttattcagccactaaatatgcaatgcgcgcggtgatggaagggttacgtgtggaagaagttggaatgggcattaaatcaacgttaatctctccaggacatgcgcaaaccgaattagccagccggattagtgatccgcaattacgagcagctgttctcaagagtgaaactgaaactggattaacagcaaccgatgtcgctaatgccgtaatgtacgccatcgatacaccagataatgtgggcattaatgaagtcattctccggtcaattgatcaaagagactattaagccattggtcaaagattgaattgagtcttgacaacgaacgctaaaaataaaaaatattttcgaatggtctagttcagcgcttgcaatcgtaagttaacggcactttcaaaaaggctttaaaatcagctaccacaaattgaattaaatacaagagtttaaattagaatgcttagcgtgtaccatatatagtgttgtttcgtcagatggtacatcaatatatggaaaatggtgttgacaatctggagtgataactaaattcatataaagagggtttcagttcaatgcaagacaatcgtgcaatcaccagtgtatttaatcctaagtggtacattcaacagatgaaagggtggacaacatccagttatggtttgttgatgtttgggttaggctttattttagctgctactatttccggtggtccaatgactggcgtgtcgtttttaacgatgctcgcggggatgttaggcttcacctgtactattagtattacgaatacgaaacctttaaatggtgtctttggtgtcatctctgcattaatctacattattgtggcttataatgctaaaaactataacgatatgttattacaaaccgtctacattattatgttagacatcccagtcttattaatgccagattgggcgcaaaacgttgataaaaaagtccgggggcttgctactcgtggtaaaggacttcgtaattgggcgttgacgctattgttctttgctatatcagtcgggttattatatctctgggaaagcaatatgacggacagtccacgaccattgatcgatagtatcgccacttcagttgggtttactggcgcactgttgaccacattacggtttaaagaaagctattacttctggttcatccaaagtatcgtatcaatcacgttgtggggcattacagcaatgcagggtggttcaaattgggtcttattcttcacctatatcttgtacttatcaaacgacttagtctcattcttcgacaagaacgtcgtttggttccatcctaaagaagccattaccaaaaattaaatcaataaaaatagcgtcccaacacaccgcaatgtgttgagacgctatttttatgatggccgggttgttttatagttcaacaccgttttcttcaaataattctggtaatgtcttcagtgattgaccatcgtattctgcgaagaaatcagccacgctgtattctttaccagcaggacgagaagcatcatagcttgcgctaattgtttctgttaacttaccatctttaatggttagttctaattcttcaactggaatactccgtttgtcagtgatcttagcatcaattaagaatggtcggccagcttttgtgacttcaagggctttgtcaaaggcagcgggtaattctttagaagaacgaacggtgattgattcaatgcccattgcttgcgcaatcatggcaaaatcttgatcttcaatgaagattcctgagtaatccattggaatatcatcttgttcactcttgatgaagtttaatgcggcatttgatgtgataatgttaatgattggtaattggtatttcttttcagtgatcaagtcttgcatgaccattgaaaaggcaccatcacccgagatgttgaagacttggcgatctgggtagctcaattgaccagctaaggcaccaggaacgcctgaacccattgaagcaaagagggcagaaatcacccatttgttcttaggcgttaagttcaagtgacggaaactgttgatgatattatcaccaacatcgattgaaaagacagcatcgtcttcagcaatccggttgatttctttgtagattggttcgaattcaagcggatcagagtcgcggttcgttaaaacatcaaggtaggcttgccagtttgccatatcagcaacagcagctttgaagaatggtgttggggcaaccgtttcgcttctggcgattactttttcaacaaaagcagttgcatctgaccagattccgaagtctaagaaatggtgacggccaaattgtgcttcatcgttatcgatttggataaacttgaagtcatgtgtccgataaattaagttggcaaatgggaagtcagcaccgatggcaatcacaagatcactaacggccatgatttcatcagccgctttagaagcagcccggttagccatgcctaagttaccttcataactatcaggcactaaccctttagcaagcccagtcatgacgattggaatttgaagtttctttgataattcaacgagcttgtcgccgccgtctttaatcccacgaccaacgtgaattacagggcgtttagcgtctttaaccattgctaagaattgatcaacttcttcgtctgttgcgactggaccagccacttttttacgatctgaaggtgagcttgagctatatggtgcatctggaatttcaacgtagccgaagtcatttggaataacaaccactgcgacgccattgtgtttgtaagcttcacggattgctttatcaacaacgtatggcaagctttcaggtgtcataacgaggcggttataaacagcaacgtcagagaacattgggttttcagcgaattcttggaagtagttgtagttcatgttcttgcttggtacttgaccaatcaaggctaaaactggtgcatgatcttcttttgcatcatataaaccagttaaaaggttagttgcaccagggccagctgaaccaaaagcaaccccgattttaccagttaatttagcgtcagcagctgcggcaagggccccaacttgttcgtgacgaatttgaatatattttaaacgatccttttcaatattaagagcattcattgttgagttaaatgagccaccagggtaaccaaagatatgatcaacgccccaagattcgataactctaagcatagcaacactagctggaatagttttttgagtagtaactgtcattatacagatctcccttaaatcaataattaggttgcgcacaaccttatgggaataatttagcatacttagaaaacgattacaagtgttaaacgtaggttaatcatatccttaattaattaaccgctgataaattggtgcttgataagattgaatggatttaagcagcaaaaaccgcgctatccgaaaatggttagcgcggtttgattagtttaaatagtctagtaaagtatcgacagttaatgcttgcttttcagtcgcgttcaagtcggcaatcagtttaccggcttttaacaccaagagtcgattgccatattgcaacgcatcctctaaatcatgcgtaatcattaggcaggtgagttggttatcgcgaattgtttgattggtaaaagtcatcaatgcttggctggaaactgcatctaaagcagatgtgtgttcatctaataacagcaattcaggtttttgaatcgtcgccatcaagaagtttaacgtttgtcgttggccacccgacaagttactaaccgggcgattgagttgttgatccaagtgattcgggagtgtcttggcgagcgctttgatttgtgggagttgttgcttgagacgccggggaaataagcggcggcgttggccacggcgcatcgccaacaaaatattttcggcaacggtcatatcagctgcggtgcccaacttaggatcttggtagacacgactaatgagccgtgtgcgttgttgggcggattgcttcgtaatgtcgtggtcgttgaatagtagttgcccacttgtgggggttaaatcacccgcaatggtattaaaaaaagtcgatttacccgcaccgtttgcgccaaggaggacgacaaattcaccaggattaatcgtgagatttaaatcatttaagagttgtttaggttcattattatcagtaacttcaaaattgaggtggtttaaagtcatacgcggggtcatttggtagtcagtcctttcttttgttgtggtgcgatgatgaagatggccaaaatgacggccgagaagagtttgaaatcattggcgttaaagccgagttgtaagacaaggagtaagatgaggcggtagacgacgcttcctaggataatgctaattagtttggcgatgaaatgcttgccgacaaggagccgttcaccaatgataatcgcggataacccaatgaccatcacaccgatgcccatgttgacatcagcaaagccgttatattgtgcaacgagcccacctgcaagggcgatcaagccgtttgacagcacgatcccaatcgttttcgtccgctttacggcaatcccttgtgagagggccatcgtgggattatcaccagctgcaatcagggattgaccgaattcggtgtagagtaagccagccagtaataatagggcgatcagcatgatgactaggttaatgactaagagccgttgatcgagcgttaattgatggaatagcggcagttgatataggttgtgttgatcaccaattgccatgttggcttggcctaaaatccgcaagttgacggaatacaaaccggttagcgttaaaatcccggctaacaaactctggacatggaagtagttgtataatattgccgtcacgagtccggctaaacagccaccgatgaatgcgactaatagggaaaaggcaatgttatgttgttgcaacattaaagcgctgagggctgcacctaacgggaaactgccttcaacggtcatgtcagggaattttaagattcgaaaggtgatgaaaacgcctaggcttagtaggctccataataatccttggtcaatggttgagataataagattcatttgagaacagctcctttttgattagcgatttgcattaaactctgcggaattgtgatgtggagggcttttgcttttttgaggtttaagactaaatgtcctttgcgtaaataccgaattggagtggttgcgggttttgaacgaccacttaaaacagcggcggtcatcttaccggtttcaacgcctaagtcgtattggcttaggccgacggttgcgagcccgccatctttaaccatcgtttcagcggatggaaagactggcgttttggttttgtcggtcacatggacgagggtgcccattgcactagcaatcgtattatcggtgggaacgtaaattgcatcgacttttgggactagattctggctgacttgttccagatcgttgactgaactaagactggcctcaacaacggtcagccctttttgttcagcaagttgtttgaataagtgcatttgactggtggcagagttatcactgcttgaatagagaatgccgacggttttcagttgcggcatgatggtttgcattaatgccaattgcttttgaatcggggcttgatcggatacgccggtgatattggcaccaggatgggcgttgttcttaacgagattggcactcgccggatcagtcacggcgcctaagataatcggtaattgcttagtggcattggctaagctttgtgcggcaggggtggcaatgccgaccgttactttggctttttcagtgacgaattgattgctcatcagacgtaaattactttgatcgttctgcgcattttgaaaatcaattttgatattacggttgttatgatagccttcgcttgctagaccagcgacaatcccgcgatgaatttcatcaagtgcgggatgagataagggttgtaaaatcccgacaattggcaatttaggttggttggcttctttgatttttttgataccaagtagggtgagcaaactcccaaaaattagaatgaggggtaaaaaacgtttgagtttagacatggcgaaagctcctttaacgtgctttttgaaactgactcttgtgcttaactacatttaccaaaccggtgattacatcaccaatttggtaaattaggttaatgctcagagtcaaaccgtttcaaacgcacttctattttttaacgtgcttttcaaaccgtattcctgtgcctagctacgtcgcacaaacgaccgactgcgtcgttcattcgcaccactaggctagtgttcgaaatatacccggtttgaacgcactcattattatcaaacaaaaaagtcccccacatgacagtcatgtaggggacagaaaaagcctacatggatttcctcgagttaaaatccatgtaggcttaaaattcaatcgattactgatgaatggccgcatggatacaatcaaaagactgtatccataacggcatacaatctcacttagcggctttgccaacgaatattcaattgtactaagtgagtgtttgtcattttcagtaacctccgttttatttgatgatctgaagtatagcgggatgggtgaaacaagtcaaggactttgagtaattttcttttgaaaataaaggtgggtctagtctgaaaaagcggtcgatctggcttgctttttagcgctaaaaaagctaaagttattaacgtatacttgtgtttaaaaacaggaggaataagacaaatatggcacatatttcatttgatgcatcccgtttggacaaatttgtccaatcaaacgaacttgcagaaatgcaagcaatggttaatgctgcagactcacaattacgtgaaggcactggtgcaggcaacgacttccgtggtttcttagatttaccagtgaactacgataaggacgaattcgcccgcattaagaaagctgctgctaaaattaagagcgattcagaaattttcatcgcaattggtatcggtggctcatacctcggtgccaaagctgcaattgatttcttgaataacacgttctacaacatgttaccagcagaacaacgtgacttcccacaagtattattcgccgggaactcaatcagttcaagttacttaaacgacttagttaacttgatcggcgatcgcgatttctcaatcaacgttatctcaaaatcaggaacaacaactgaaccttcaattgctttccgtgttttgaaagacaagttgatcaagaaatatggtaaagaagaagctaagagccggatctacgcaacaactgaccgtgctaaaggcgctttgaagacagaatcagatgcagaaggctacgaagaattcgttgtgcctgatgacatcggtggtcgtttctcagtattaacagccgttggtttattaccaatcgccgttgctggtggggatatcgaccaattgatgaaaggtgcagctgatgcccgcactgaatacacagatacagacgttatgaaaaacgatgcatacaaatatgctgctttacgtaacattctttatcgcaaaggttacacaaccgaattattagaaaactacgaaccaacattgcaatatttctcagaatggtggaagcaattgatgggcgaatctgaaggtaaagaccaaaaagggatttatccttcaagtgctaacttctcaactgacttgcattcattaggtcaatacatccaagaaggtcgtcgtaacttgatggaaacagttgtcaacgttgtgaaccctaacagcgacattgatattccaactgatgaaaagaacttggacggtttaggctacttagaaggccacacaatggacttcgttaacaagaaagcttaccaaggtgttgtcttagcacatactgatggcggcgtccctgttatgtcagttaacatcccagatcaaacagcctacacattaggctacatgatctacttcttcgaaatggctgtctcaatctcaggttacttgaatggtatcaacccattcaaccaaccaggtgttgaagcttacaagaagaacatgtttgctttattaggcaaacccggctttgaagaattaggcaaagaattaaacgaacgcctataattcaacgtttataaagataaaattcgacttttattaaagcatttagtctattgattttatgaaatggtgcagtatttggtgcattgttctaaaataaatggattaaatgctttttgtttaatacggataaagaataaaatatataaattgcttatttttagtaagcgaagtataatgaccttatcaaagatgaccaattcatcaataatattaaaagtaaaaatggagatgatggcaatgttagtcattcaatatgtcaacggtcaaacgaacgctgaaaaggtttatcaaaaagcggctgaatttgtcgcaaatcaacaactggaagtacccgatttcgaagattacgtcgcaattaagcaggtgacgttggatgggcagccattaacgttggcggatgcgaccatgcgcggcttatataattatttaaatcaataaagttaatctgaaagaaaaacgtcgctcaagagagcggcgtttttgagttataaaataaaaaagaccagccaacggcagtcttttaattaacgtgtagtaatcataatgagatttgagctgtgataagtttcgctaggactattttcgaggataaaagccggcgtgtccttaacaaagtgcgagatttttgcgacgatatctgcagcagcacagtctttgatggtcaacttatggcgtgaaccattcgtagaaccaaaggcagataatgtgtcattttgttggagcgcaatttttgagccctcgttaaagaataacttaaccataatttaaaaccacctttcgtaagtaaatcatataatattgataagaaaatcacaaggataattaacaattcaatgcccttaatattatccagtgcaattaattttcggaaaattattcgttaaaagaaactactttttctaatattcaaacgccatttcattaaccgattcttccaagccttcgacaacttcattttgttcaatgaacgttaaccaagtttgatattctttggcgtgttcaccacgaatgttgaatgccattttcacttgaatactagcgataaattcggccaccattttatcaacggcccgatcgaccttattctcgttccaacgtctggcaggttggcgtttttggttcttttcattttggtagtctaaacctttggctcgaaatgtatcgatgacgcgggaatgttcttcaagataggcctgtagttcggcattgttcatagtcgtgctcctttaaactctaatagttagcaagtaaagattttagttcagcttgggcagcggtgtcttcagaaacggcaaagacaagtggttctgagtaagcttgtttgccgtcatcttttagttcgctgaaaccatcattagttgatgtgaggtgaccattacctaatttaagttcatacacgacgccgttatcaccaagtaggtatttgctaaccggtttgtccattgccatgttaaggctgtaattatccgcgaatgatccacgatctaaattgtctttaccgactgttccatccaaagcggtataaaagacacagccaccaattgcatgaacagggtaggcattaaaccctgggcttgctgtcccaggttgaactaaaatgcggccatcaggtgaattggcaaaccaatcgccaaatccggcagcaccgtggtcaaaataccaatcactgacggccatgtttccgattgtggcgcgttcagccgcccacgctagaaaagcttgattaacagaagtttgttggtcggcagtgagcgcttttttggcacttgttgactgattagattgttgttttgcttgttcaatagattctgaagctgcaacgatactttctgattgttgtttaatagaagcttctttcgagctagcgattgatcgacgctgattgctttcttttgcttctgatgaggcgcgatagcgtgctaaactttcggagtgggttgcggcttgttgatcaggtttaattgaccgacaactagctaatgaaagactacttaaagtaatgaacgtgactgcaatggttcgtttatgcatgttaaatcccccaagttaatgattaataagtcattgcacggtgtccctgtggtgcagcaattttccagaatttatcaaatgagattttttttcgtttgccggtatatggatcgttaaaggtaaatgaattttgatcatagccaattaataagacggaatgcgctggttgtttatggtagttaatccaagcgacaattggtttcttttgttttaaagtagctttgagcgtgctaatcggttcgtccgataaatcggtgaaactgccgagatattgatagaagaatcctgtccaagcaggaggatacatagtgtagccagtatcatcgtatggattcccccaaaagccgacctccatatcgccatcattgacataagggatactatcggccacttctgttttgctcatgtcaacgccacggtaatctaacagcatggcaacagccgtaatttcacaaccggttggtaattcaggaaattgtgaaatgggtgtgatgtcgagcatcgtttttttgggtgtttttttcttaacaattttttggggtgtggttttatggaagaaccaaatcccggcctcacttctggtcggtcctgtgaaaagccataaaaaaagggtggtaatcagtattaaaacgactgccacgcgcttgtaaaagtgttttggcatttgataatcctcattctaaatttagtcgacgaaataaatatttaaaatagtatagcatttaaaggggcgcaatagctatagccactcacggatttcaactgtgatggaatcgccaatttcttttttgagttgtgcacggatgtctttgcggaccccaagaatgtaacaaatgttgccatctggctttttaagtcccatattgacaatactgccatcatagggaatttgttggtcgaaaagggcgtggacttttacacgacccttcccgaagattgcgcggatatcgccaggaaattagacatatgcaccgcctttaccaatcgtcgcggcttggattgaggctgtaaaagtataagtttgctcggtcaccggtcagaactccttaaaaaaaacgtcattaaaaaaagtgaccacggcaaattcagtcgtcacttttagtgattattggaaaaagcgcattaattggcgattaaaacttgcccaccaagtgtttgggtgcaaaagggttgcaacgattacttggcgatgttgtaagaaccagcgcttaatattttgatcagacaatttagtgatatcaaacggcatttcgaaccactcctaaactacctttattatatattagaaatgggacacgtcaaaaacaaagcattaaacttaaccaatctttaaaccggcttaaggcttaattaataagacgttggtgttagaatgaacactgatgaattgtgcaacagaaccgattaagagccgctcaaaggcgcccttaccactgacaccgagaactgttaaatcaatatgagcttcttctgggatgataaaggctaattcacgacgtggtgaacccactttaaggatggctcgtacgttagggacaccgtgttctttagcgaattgcaccttttgatcaagatacgattgaacgaaatgtttttcagatgtcgttgtttcagcagggtaagtcatgcgtgcatttgtgtaaagggtatctggaatgatttgagccacaactaattcggcattattgcgtttagcaatttcaatcgcctcactgaaagcgcgttctgataactcagaaccatctaaaccgataagaatatgctgataattaaacataaaaaagacctcctttatttaccttcaatatagcattttaaacgaagaaacgccgtaaataagcactttaaattcgatagggatagctggttgagtggctataacaatttggcaccactaatttgtgccgaccgtatcgtttactttgattgaactgcgccctataataagaatgtgaataatttctcccgaaattttttaaccactatataaaaaaagagccgtcgaatcgtagattcggcggctttctttttataaatgattaattgaaagttgtgtgacttgttgcttgttgttattggtcgtcataacggtatagcgaacttcgcgatccgtcagttgcattaatgacccagatttcttaagtgagcggtcgaccaattcagtaatctgggttggtttggttccgatacttgttgaaaaggcgaggacgtagtttttaaacgttagattcttacctgcgttgagagctttaattgagatccccagtactttgctatcactgacgttcatggcaatcacgttgttgctgtcaacttgatcagtgcgaatgccttcaagtggattcgcttcgaaaacgcccagtcctttttgttgggcaatcggattataaatctgaataaagttcggccattgcacaatttcttttgcgacagggccttcaacataagttggattacgcatttcttcattatcagcaagtgtaatccggtactgcttagctttgtaagggacttcgaatgcgaaagcatcatcggttgttttagtcgtatgaatggtatcaccgatttgccaataaacctttttatgtttagtcttaccagtgatttgcgcattgaagccactgtttgtttcgtggagctttgctttaaccggattcccacaagcggttaaaataaaagttagacctaaaatcatgaataataatttgacgtgacgcatttctcacactcccaatcgataatagggttaactatgaatcaaaaaataaaagactccccagtcttctacttcattgtaacccatttcatctttttttcaaaatcaccatattcactatttaatactactgtaagaaaatttcaacttctgaattgcgcggacatgtcgttgattagccttgtaaacatcatcagtgtattcttggaaagttccgtttggacgggttgcaacagagacgaacgacccagtcttggataagacatctttggcgtaaacgagttcttggcgattgttatcagtcgcgtagtctttcattttttggtagtcaccttgagcactgacatagtaatcatcagcgtcatcgagttttccttgtgctagtaaacgccgaccttcagcagcaacagcactatcatgatcgttataatcaacatttgcgacgttaactgttccgttttctgttaactcgccccaaactttattatacttttgagcgatgaattcagtggcaacagtcgattttttaatatgtttgatgaattggcgttcagctttatcgaattttttatctttcttttcaatcttcgctagttcttcgcggtgttctttctgagccatgtagaagttatagccaacaggagatgccgcgataatcaaaccaatcaagcaaataattagaggggctttaagccgttttttaaaaattaagaaaaataggagcaggataatgccaaatgcaaagacagcaaggcctgcataaagaacgatggcgagtattaagttcatatagtaacccccaaaacagtaatcggataatcagggttaatacggttaatcaatgaatattatcccattttatgagatattagcaagtcaaatttacagaaaggtctgtaaaaatatgaatcttctcatgaaagggatttaaacagaaaagtcaattgtttttccttgcattttcccgtattataataggatacgtaaaaatatgaatcatttataggaggaatagtagtggacgcttctttgacaacccgtttggctgccgaatttattggaactgcaattatgattatttttggtaacggggcagtagccaacgttgaattaaaaggaacaaaaggttttagtagtgattggtttttaatcgcttttggatatggttgtggggttatgattcctgccgttatgtttgggagcatttccggtaaccatcttaatccagctgttacattaagttttgcagtgatgggcttattcccttgggaaaatgttttaccatacatcattgttcaattcttgggtgcaatggttggtcaattattattggttgctgcttacaaaccatattatgatcgcacaacaaaccaagaaggcatcctgggctcattcgtaacaatcgatgctgctcatagccggatgaatggttttgtaaatgaatttttaggcacattgatcttagttttcggtgctttagcaattggtgcaggtaagtttggcgctgccggccacattgttgttggtttattggtgatgacattagttgcttcattaggtggcccaacaggaccagctttaaatcctgctcgtgatttaggcccacgtttggtgcatatgttcacaccgcttaagaacaaaggcgactcacaatggagttacgcttgggtgccagttgttgcaccaattatcggtgccatctgtggtgcaggtattttccaaatgatttttgcataacaaaccgcttctaaaaatagtccgtcaggactattttttttgctttcaaagcaaaaaatacccggcataaaccttaattgggaaaggcctataccgagtatcttctgaatattgaaatgatcttacttgggggagtattaatcatttctgttattgaatatatcataaaataacgggagtttacaacccttttacgtgtaaaaccctaaaaaaataaattattttataataatgcatattattaatctcagtctgcaatttatttaacgtgtataatatttcggaggtacgcatattaaataatcgactgagaaaggtgtgcgaccactttagagaaatggtacaatataaaatgttggcgattacatttaaggagagtagcgtttatgattaaatttccagagcattttatgtggggagcagcaacatccgcacctcaatcagaaggatactccctaagttatggtaagtccccatcaacctgggacaaatggtttgagatgcaacctgataagtttaatagcgatcaagggcctgacacggctagtgatacttatcggttgtatcgtgaagacgttgaaaatatgcaaaagattggtttgaactcatttcggacatcgattgcttggacgcgattaatgcccgatggcaaacatgttaatcaagtagcggttgatttttatcgggattattttaagcgcttacgtgatgcagacattacaccgatcattaatctgttccatttcgatatgccttggtggctaatggaaaagggcggttgggagacacgcgaatcagttgatgcctttgcattctacgcaaaaactgcgtttgaattgtttggtgacttggttgatcgctggacgacttttaatgagcctatcgtgcatatcgaatgtggttacttaacgggctatcattatccagacattgttgacttcaagaaggctgttcaggttggctaccataccttgatggcgcatacagcagctgttgctgaatttagaaaagtgaagccggatggtcagatcggcattattttaaatatcacgccagcttacgctaagagtgatgcaccagaggatttaatggctaaacaaaatgctgacttactactcgctaagagttttctagacccaactgttttgggcgttattccagaagaattaattaacctcttaacaaaacatgagttattaccaatgacgaaaaaaggcgaccggcaattgattgccgatcattgtgtcgattttatcggcgtgaactactatcaaccaatgcgggttcaagcaccagagaatccgaagttcccagcacaaacaccggaagacttatatgctaattatatttggccagaacagaagattaatccatatcgtggatgggagatttatccagaagcattgtacgatgtggcaatgatgatgaaaaatgattatcacaacattccgtggtacgtttctgaaaacggaatgggtgttgccgatgaagaacgctttatgggtgaagatgggcaaattcaagatgattatcggattgaatttatgcaagaacatctgacacagctacatcgcgcaattgaagccggcagcagttgttttgggtaccatacttggaccttcaatgattgttggtcttggttaaatggttatcggaatcgttatggtttctaccgtgttgatttggaccatgaggcaaagcgcacgatgaagaagagtggtcgatggtaccgtgaattgagcgagaataacggcttttaggccaaagaaaaagaaccgacgcatcagtcggttcttttttgagttaaaagatatctgtttggacatatttattgtgtaattcaaagaaatcataagtcgctaagttttcaatatccgcttcaccattgaagatggccgttgcagaaccagccaacatcaggttaattggtaaattatcacgaaaacgagcgagaatcactggtttattgtgggcaaaagcataaccacattcccacatggtaccggaatcaggttcgaattcgccttcttcagatttaaaatccataacagcgactacgacatctgcttggtcaatttgacgcgtatcaacattaaaagtagcgacttgccattcgaaagtaccgaattctgcatcaggataagggtgttggcctggtttgaaaagtgaatcagcatcaatcgttgggtttttaatgagtaaatcagccacttgatctaaccgatcgttttgttcggggctaaaaaatgggccagcgagataaacttgtttttttgagggcatgagagccgcctttctcgataatgttcgcgttttttgtagtaatttaagcttaaaaagctatttatttaattatatacgtacgaaaaataatattcaatatatgttctgcaaaaaaatacgaaaaaaaaaactgcttacgcagttttagtgaacgaacaagtaaataaccaatagaataaaggccacaactaagattgtgaacatgtaagttgaagcggtactaacagctttcttacgttcctttgatagtggtcggttcgctagtttcttgtattgcttcttagcaatttcaaattgacgtttatctttcatttgtatccctcgcttgtttcagtgtccctattatagcatggaatacagtggattgataattattgatgataagactggactttcaatctggaacaagctacgataatgctatattggagtataaggaagtaacaaatcatgaaattaaagacaactaaacaaacaactggacataaattatcagttgcagggattttgattacgatgggcgtcgtttacggtgatattggaacgtcgccattatatgttatgaaatcaattgttgaggggaatggcggtttggcaaacatcagccgcgattttatcatcggcagtatttcgcttgtcttttggacgttaatgttgatgacgaccgtcaagtacgtcatgattgcattgcgtgcggataataatggtgaaggtgggatttttgcactgtacactttgattcgtaagcaagctaagtggctcgtgattcccgcgattattggtggggcgacgttattagcggatgggatgttaacacctgctgtgacagtcacgacggcgattgaagggttaaagggtttgccaattaatgggaacgttttaattaataatcaagatcaggtgattttattgacggtctcgatcttatcggtcttatttttcattcagaaatttgggactgatctaatcggtaaatcttttggtcccattatgttaatttggtttacctttattggtggcattggtttggttaacttaatgggggatctaacgatgctcaaggcactcaatccgtattatgcgattgaactactgtttagccctgagaataaggtggggattctaattttaggcagtgttttcttggcaactacgggggctgaagcactttattcggatatggggcacgttgggcggttgaatatctatggtagttggccatacattgcgctttgtttagtgttgaattactttggacaaggtgtttggttattacaacataaagatattgcggcatatcaacatatttctgatttcaatccattctttgaagtgatgccagcccaattaaaggtcccagcgattttactggctacaattgcggcgattattgcatcacaagccttaatttcagggtcatataccttagtatcagaagcaatcaagttgcgcctcttaccacgaattaaggtcgattatccggctaagttaaaagggcaactctatatttcaatcgttaactggattctatgggcggtttgtttaatggttgttttctattttaagaactcagcgcacatggaagctgcctacggtttggcgattacgattacaatgttaatgacaactatcttgctattccattacttgggacgccgcgagaagaaatgggtattggcttatttggtactcatcttcttcgggacaattgaagttattttcttcatctcaagtgccgctaaattcatgcatggtggttacgtgacagtcttaattgcggcgtttattctatcgatcatgtttgtttggtatcgtagtaatacgattaaggaaagtaatactttcaaggcaagtacggtttcattactagcttataaacaacaactacatgatttgcgagacgatacagcgttagctatgtatacgactaatttggtttatctttcaaaaccacagaataaaccatatgaaaagaatatggttaagaagaatattctttattctattttggataaacgaccaaaacgggcgcaagtttactggtttgttgcggtcaatgttactgatgaaccgtatacggcagaatataccgcagatacgcttgggacggactacattgtcaacgttcagttgtatctaggctttaagatggaacaaaaagtgaacatctttattcgtcaaatcattcaagaaatgattcatcggggagaattaccagcacaaccacaacgctacacaacaattccaaatcggaacgttggcgatttctcgtttgtgatcatgcaagaagatttatcaccagcaactcaaattcgagcaatggataaagggattgttcaaatgcgtttatggttagaaaaattcactgatacaccggcttcatggtttggattggactatagtgatgtgttcgtggaacgtattccgctagttcttggccgccaaaaatcggtctctaagtatcatttaaaacgtcgtgaataacatcaataaattagtttataacgcctaggacagaagattgtcctaggcgttatttgtgtaatagcagtcaagtaagcggtgtgcattacaattagcgcgggaattgccgtcattttgttacctgtttgtcatcaattgttatggttttgacatgtacaagcgaatataagatggtatattagtcccacgttaataaatcaaaacaacaaggagcacatctattacatgaaatcttttaagacattattgcttagcgctacattgacaacggctgcaacagcaggattacttttcgttggtcaatcaaaagcaagtgccgctactacttataccgttgcaactggggatacgttatcaacaatcgcccaaaaatttgccggtaacacagatttagtcaatcaaattgccacaacaaacaacattcaagatatcaacatgatttttgtcggggaacaattaacaatcgacactgaccaaacagcaacccctgttcaaacgacaacgccagtagttgttgcacaaccagccgctgttcaaacaccagcaccagttgttcaagcacaacctacagtgcaagctacaccagttcaacaaacagctgctgttgcaccgacaactagttcagcgaaagaatggattgcgcaaaaagaatctggtggttcatactcagcgcgtaacggtcaaatgattggccgttatcaattaaccgcatcatatttaaatggtgactattcagcagccaatcaagaccgcgtcgcagatcaatacgtaacaagtcgttacggttcatgggatgccgctaagagtttctggttaagtaacggttggtattaaaatttaaggttcctttaacgctcaatcaaatttaatttgattgagcgttttttgttctctgagaaatcacacttgactaaatcgaatgtatgttcgtataattaagaggacataagatgaattaaagaggtgtgcctgatgcatacgaataaagaagtgattacgctagatcaaacaggattgagtttatatttaaatggctttggagttttagaattgcggcgattagcggtgaatcatagtgatgatttgattgactcaatgaattattactacaaccgcgataagtttccgcaatttatttatcgtcatctatcagccgtcaccttgattgagattaatcggtggcaacgcgaattagatgaacaagtgcgtcagattcaagttggggtgaagagtcgtgtatgactatcagaatgaaccacgccgcgtgattttaatgattgattcgaaatctttttacgcatcagtagaggccgttcggttgaaactgaatccgttaaaggctattttggtggtgatgtccacggagaaaaacacgggcagtggtttagtattggcagccagccccatggctaagaaattatttggtatcagtaacgtaacgcgtgcccgggatgttccaattcatgataagcggttaatcattgagccacccaagatgaatttgtacatccaagtgaaccagaagattaaccgtatttttcagcaatttacggcagaagaagatattcaaccgtattccattgatgaatcgttacttgatgtcacggatagttggcaactctttggagcgacgccatacgaagtcgcacgtaaaattcagctggctgtaaaaaaagaaacgggcatttatttaacggtggggattggcgataatccgctacttgccaagctcgcattggatcttgaggccaaacggaatcacagtttgattgcagaatggcattatgaagatgtcccagataaactgtggccagtgacccagttagatgatgtctggtcaattgggcatcgtacggcagagaaactgaatcagaaacacattcattcgatgtacgatattgcgcatacaaatccctatcggttaaaacaagaaatgggtgtcatgggcgcgcagttgtttgcgtttagttgggggattgatcgggccgttgtacggcataaatataaggccaaagagaagtcttatgggaatagtcaggtattaccacgcgattattttatccaagctgagattgaagttgtgattcgggaaattgcagagcaagtggctgcacgtctcagggcgcatcacaaggcgaccacggttatcagtctggggattggcttttcatttgctgcaaaagaggatgcatcgcgtggtggttttgggcgttcaatgaagattgatgcgactaatgctaatcagcaactcacaaaacatgctatccaactttttcgtgaagaatggcaacacgaatcgattcggcatattagtattgcgtgcagcaatttggttgacgatagtgcggaacaattagatatgttcgacacacagtttattaatttgaaaaagcagaaattagatagcacggtcgatgaaattcgcaagcgctacggttttacatcggtggtcaaattgtctagcaaagtaaaaggtgcgactgcaattgagcgtgctggcttagtcggtgggcatgctggagggaacgcctatgaataatgatgaatatgatcccaatttggttaatcaatttttgaagtatgattattatgatcgtggcatgatgaaatggcaagggttctatttaagcgatcatacggcagtgttagataagaataaccgcgtacaagatcgtaagcgcaatgaaaaacacattgaggcgatgactgctgagatgattgctaataccatcaatgacgcaattgttaaatgttatccggttcaaatcgacaaagcagaacgttcaatagaaggtattgtacccagtaaggtggaaggtttaatcagtggctggtttggtagccaaataattgtggcaaatgaagccattttaatagaagaaatctacgcaataaaaaaactagccccctaactaaagcgtcaggaggctagtttttttacacgtttttaaacaaacaaaaaagccgttaaaccttagtttaacggcttttctgggttctaggctgttttaaatatcacccgtacggggatcgaacccgtaactccgccttgagagggcgacgtcttaaccgatttgaccaacgggcaatgttcggaacaactaatatcttagcgaataaagcctataatgtcaatggttaattgactctagcgaggctaaatgaagattttatagttacgacgattaatgttaataatttccttggtcatagtgcgatttgtttgtctctttaaatgtttcaagatattccgaatatagtcctgatggtttatcagtagatttagaatatcgttatcaattgtgacttcaagcgtcctgcgtgaatctatccaatcaatcacaacgtggtcttgatcatatacggcaactttcccgtcaaataatttttcgatttctgcttttttcatcattggaaccacctccaagaatagtatagtcctcttttaaagatttgttaaaaatcataattgacaacgtctggagtgtgcagtatcatagtattcgttgatggtattgggtattcgccaaattggtaaggcaccggactctgaatccggaatttataggttcgagccctatatacccaattaagatagaaagagctgagtaatcagctctttttttgtggcttcatatcgatagggcagattatttgtatctctctgtctcaaacatgatttggatcgcatagcgatccgcaatcttagctaaagcccgtaaattgaagaaccaatagtgtgctaatagcttacttttgaaaattaatgttttgtcctgagcaccggaaatttgaatcattcgatcatccaatgcgacgtttaaatctaaatcatttaattttaaaactttcattttgatcacctcgtcttattattacgttaaatagggcgattatttttgaaagaaggttaattaattcaaaatagcatatttagcatttttattgactgtaatccttggtgttattagcttttaggtcgattacaggtcaattaaattgtgggcttcattacaaagttaggtgaaattgccgtcattttgttacggatttgtcatcaattgttatggttttgatatttactaacggatttaagatggtatattagtcccacgttaaacagatagaaaaatcaatttaaacaataaggagtccattcaaaatatgaaatctttaaaaactttactttacagtgccgctttaacaaccgtcgcaacaaccgggttacttttcgttaaccaatcacaagccagtgccgcaacaacttataccgttgcaaatggtgatacgctttcaaccattgcgcaaaaattcaatggtagtaccgagcttgttaaccaaatcgcaacaactaataatatcgctgatattaatatgatctttgttggtgaacaattaacaattgatgctgaccaagtggcaacaacaccagcacaaacaccagcccctgttgtaactcaacaagtagctgcacctgttcaaacaccagcccctgtagttcaagcacaacctgcagttcaagttgcaccagtacaacaagcacctgtagctgcacaaataacaactacaacgagttcatctaaggaatggattgcacaaaaagaatcaggcggttcatattcagcacgtaacggtcaattaatcggccgttatcaattatcagcttcatacttaaatggtgattattcagcagctaaccaagaccgcgttgcagatcaatatgtaacaagtcgttatggttcatgggataccgctaagagcttctggttaagtaatggttggtactaaactaaaataatgacaacgtctaggccattggtctgggcgtttttttatggtaagttagtgattggaagtgtaaactgaaagtagtataaagagtgaggcttgatcagatgaagattttaggagtgttaggcagtcatcaacgagatggggtcaatgggcaacttttagatgccgttttagcaggtgtaaaaccggaagatgacgttgaagtgatctttttaaatgattatcaaatattaccagatactggcaaagccaatccggtattggatgaactggaagctaagttattggcagccgatgtttggatactggctgcgccaacttattggggcgcaatgtcgggtgtgatgaagaactttttggattgtatgcggcaacgcttagtgcgcttcaatcgggcgggcgatgcgttaccagatcgcttcaaaggcaaaagttacattacgattagtagttgttatgccagtccagctgaggaattggttactggtgtgactgacgggacttttagaacttttgataaagtcttgggggcagctggacttttaaaaatccgggaagttgtccagacaaaaacgtatggtttaaagacactttcagcgcagaaacaagcggaatgtcgccaagtcggcgcaagcattcaatctaaagcaaagaggacggatgatacagtgaaacggtatatacaactatttggcatggtcgcctttgcaaccttgattacgatggtactgcaacaattagtgaacttagtgttgccaattggccagttttggcttaattatgtgtcattcgttttaatcttcttcattctattggcaagtgtgttacacttttttacggtggttaaacaccgcagacattaggagggattcagatgaaaattgcattgattgcacatgatcgtcagaaaccaacgattgtgaaactggcgacggcttataaacctattttggcgcaacacgaattatttgcgactggaacgactggtcaaaaaattattgaagcaactggcttgccgattacacggtttaagtcaggtcctctagggggcgatcagcaaattggcgcgttgatttcagaaaataagatggacctggtaatctttttgagagatccattgactgctcaacctcacgaaccggatgtgaatgcattaattcgattatctgacgtttatgaagtaccgttggcaaccaacgtcgggacggctgaagtattgctgcgcggtttggacttaggactggtcgactttagaaaagtggtccatggtcaagatgtcaattcaattaatttatagtgtaaagcggattgtaccttatttcgactgtgaaatagtgcaatccgttttttgatttcaattttaatttgcgtataataagagtattgatttggagggattggattgcaaaaagaaatagggtttcatgatcggctaagcacggcgatgtttttaacgtttcttggtggcttcttagatgcgtattgtgtgattttacgtggtggcgtctttgcgagtgcacagaccggtaatatcgtgttcatcggcttagatatcgcaacgaaccagtgggcacaacttcctgaaaagatattacccattatttcatttgggtttggggttattattgtgcagctggcgaagcggcattttaacactggtgggttgaatgtttggcggttgtggttattagggtttcaaattattgctttagtagtagttggttttttatcaaccgcgattcccaacatgtttgtgacaccgattctgtcgatgtcgatggccatgcaattagcgagttattcaacggttaatggctatccatatgcgaatgcttttacgaccggcaattataagaaattaatcgaaaatacttatctatatttagcgaccaaagaaaaaaactaccaacaaaaagcccggtacttcgggttaattgttggtagcttcttcattggtactattagctcagggttaattgttaagttaatcaatgtgcgcactgcatggatagctgcgattatgttgacggtgttctttggttttcaattgtattttacagaagaagtgattgctgagaccaaacatatgcaacgttagccgtaataataaacaattaacatggcaatgaaatatgcgccgcaaacagcagtgctaatccaactggcaatcagaatgatgggatgcgcaataaaggcacgcatgacaaagagaaacaaggttaaaatagcatacttaatacagctgacctttagctgttcaaaatgaggcttattcaaaagaaagatccactaaataaagttgacggtcactaagatgggcggtagtaatccacacatcttggaagccgtctttttgtttttcttcggtttgttgataaaaagtcgtcaataagtcatggtgttctttgacgtactcggggtcaatccggttaacgtgtagccgcatatcagggaacagtttctcggcatctggcagatcgacttggtcactaatgccaaagcgaatcacgttcgcatattgaaacggttctagaaccacttcatcaggatgttcttggatgtaagttaagatggttgttaatgcagacatagtcatgcttcctttctagtcgtttaaaaaatcgtaaagccagcagtaatgttattcaacatgtgtaaggcaatattactcttaatattatgggtgcgatagtagacgatagccagaattagtccaagcagtgcttttgaaatgaaataaatcggatcagttgcgccgtgcatcaatccgaataagatagcacttaacccgattgagatgattggtgtgcctgggaaaaaccaattcattaggaaccctctgaaaagtaattcctccataatcggacctaagaatagggcgtatggtagcatgaaaataccaatcgtctgaaagactgaggttagtacatcaacattggcattaccggtagtatgcataaacgggatcgtaccgttattgacagcaaccatcgcaataaagccaatcaacattgtccaccaaatctgtttggtgaagggttggtcataacgcgttgatttaattttttggtagtaataccacattagggcagtaatgccgatagtcgtgattagaaaaagccaaccaaagactaaaatcagatgggttgtctgttgggccttagggagcaatgttaagccactgacaagcattaaaggaacttgttggatgataatcagaagtaaaaaggcaatcccatgtttgacgtgtttgataagcgccacctccgtgtgcttatcatagcatattcccgtgaatgaataaaagattgaatgcggattgctgttcaaggcacgatgctttatgttagattaaaacagttaagaaaggggtgtctggatgtatttagcaattaaagaaattaaacatgctaaattacgttattcgttgatcatttttacgatttttctaattgcatatttaatctattttttaacggggttggcatatgggctagccaataataaccgttcggcaattgatcaatggcacgccaaagaagttgttattagtcagtatgcgaataaaaacttggcagcttctgaattagatgttgatcaattaccctctattaaaggtgcacagaaaaatcatgcgcaacttgctcagatgatgggtgttgtgagtggttcaggtttaagtaagcaaaatacgagtgtttttggtatcgattttgatgcttttttgaagcctaagttgcaaaaaggacggtatcctaaaaaagcaaatgagattgtggtcgacgacggcttacaaggaattgctttaaaccaacaaattaaattgaatgggcgtcaacaaaagtacaaaattgttgggattacgacgaaccaccgctataatacgcaaccggtgacttatttacggttgaccgattttagccgaatgcgttacggcactgatcagattacgcgcattaatgctttagtattaaagggaaacgcacggattaagacaacggatcagctgaccaaactgacaattccagaattaatcgataagattccggggtatggtccacaggttaagacgtttggtttgatgattggcgcattgctagtcatcgtcgcctttatcgtggggattttcatgtatattattactattgaaaaaacggccgtatacggggtgatgcgagcacaagggatttcaggtggccaattagttggtagtttaatgtggcaatcggtgttcttaggggtgattgggattggccttggtttgttgtgtaacgcattgacaacattggtattaccagcggcggtgccgtatacaaataatcctttactaattggggccttttctgctgttttacttgtgatgacagtcattggcgctttattctcaatttggcggattctgaagattgatccgcttgatgcgattggaggggcataggatggctttaatgcgtttagaaaaaatcgtcaaaaaatttggcgcaggcgaccagcaaaccacagctttagatcaaatcgatttaacgattgaaaagggccagttcattggtttaaccggaccgtctggttctgggaagacgaccttattaacgattatgggtagtttacaaggcccaacgagtgggaagctcttttttaaagatcaagagattagtcaattaagcgaaaaacaacggtctgcattacggtttaacgatttcggctttatattacaaagttcgaatctggttccatttttaacggttgaagaacaattcgaactagtcgatcgattacgtgaaaagcaagcgccacaatcagctgaacaactattaaccaatttaggtgtttggaatcaacggcgtcagtacccaacgagtttatctggtggtcagcgtcaacgagttgcaattgcccgggcattgtatggtcagccagatttgatttttgcggatgaaccaaccgctagtttagatagtaaacgggccttacaggttgctgagcagctggctaaaatcacgaaagagacaggacagacgattgtgatggtttcccatgatgaacgtgtcttggattatacagatcatcaatacgtgatgcgcgatggtaaactgacataatgcgactcataatcataaattttgactaatgttggttagctatcctatcatataggtagactaataagaaggagtgattttgaatgacagataaagaaaagttagatggcatgaaagaccaagtaaccggtaaagtacaagaaacagccggtaaggtgactggtgatcacgaaactgaggccaaaggtaaagcaaagggctttatgggtgaagctaaagaaaaattagcggatgccaaagacaaagttgctgaaaaagccaacgacgtgatggatgatattaaagaaaaaatggacaaagacgataaatagcgccttttaaagggaaccggcagacgatagtctgccggttttttttgtggatttaatgcttgcatgagtgcctaagttggcgtattatgacagtacgtcacaattatgacgctctgtcattaattttcagaaaggagtatcgaaatgccgaagaaaacattttttagattacctgaggaaaagcaacaacgactgattcaagctgcgcatgctgagttttcacgggtaccatttaatgaagcatctgtcagcaacattattaaaacggcggagattccgcgaggcagtttttatcagtactttgaagataaggcggatatttttttctacgaccttagcttattacgcgacagttcaaagcaggatttagaaaagagtctgttggctgttcatggtgatctattcaaggcaattcgccaattctttgctgaaatggcagaagagattattaatggtgaaaatgcacaattttacaagcacctcttcttacatatggattataagaaccggcgcaagatgtcaccagaattaatgcatgctaaacaagtagatgggatgcgctttttagaagaaaacgtcaattacgacttgctcaagattaacgcagatcaacctgaagcgcttagaattttatttcatgagttgatgacgacggtctttcaaagtattgcagcgtattatttgcaacaagaaagtgaccatgcgattacaattgaacaggtccaagaacgcttcgaattagtattaggctggttagaaacaggggccagcaaacaaggataaggaaagaagggacacacaacatgcttaaacttgcaaagaaaagaatgtcaggttgggccgtctttggtgcgattttattcatgacgattcaggttgttagtaacctttatttacccaatttaacctccgacattgtcaatgacgggattgctaagggggatattgattatatctggcaagcaggctttaaaatgttaggtttttcattaattagtattatcgcggccgtctgcaacgtttatcttgcagcacggacgtcacaaggcttaggccaaaaattacgttcagatatctaccggaaggtcatcaatttctcacacgatgaaatggatcaagttgggacgtcttcactaattacgcggacgactaacgatgtggtgcagattcaaaatgtggcaatgatgttcttacggatgatgattatggcacccatcatgttgattggcgcaagtttcttagcgtatcaaaaagatgcgcaactcacatccattttcttggttgtcttaccaatcatggcactcttcattggtggggtgatgtacttcgctgtgccattattcaaggcaatgcagaaaaagacagaccggattaacttagttttccgagaaggtttaaccggagttcgggtcattcgagcattccggcgcgacaagttcgaacaagaacgttttgatgaagctaatactgactacacgcaaaatgcgaagaaagtttatagtattatgtcagtgatgttcccagccatgacgttaatcatgagtgggactaacattgcgattacttggatgggtggacacttaatcgccaatcaagcaatgcaagtcgggaatttattagcgttcatgacttatgcgatgcaaatcctcatgagtttcatgatgctttcaatggtcttcgtctttatcccgcgggcgcaagcttcagcagtgcggattaatgaagtgcttgatttacacacgccgattgaagatccagcgacgcctaaaacgtttggtgatcaaccagcaagcttggctttcaaccaggtcaacttccgttatcaaaatgcggaacacttagcgcttgaaaacgttgatttccaaatgacagcgcgccaaacagtcgccgtgattgggggcactggctcagggaagaccacgttagtcaacttgattcctcgtttttacgatgttgaaacgggtgaagtgacagtcaaagggttaaacgtgaaagatgtgaccctccatgacattcaccaacaagttgcatttgtccctcaaaaagcgaacttatttaccgggacgattcgggaaaatatgcaatatgggaatccgaatgcgaccgatgatgaaatctggcacgcacttgaaattgcacaatctaaagatttcgtcagcgaacttgaaggtggcttagatagtcacgttgaacaaggtgggggcaacttctctggtggtcaacgtcaacggcttgccatcgcacgggcgttggttaaaaaagcggctgtttatgtctttgatgattctttctcagcgttggactttaagacggatgccttattacggaaagccttaaaagaagatgctgaaattcaaaagagtgtcgttgtgattgttggtcaacgggtatcaaccgttgccgatgccgacaccatcttggtcttggatgaaggccagctggtcggtaaaggctcacatgctgaattgaaggctaataacgccacatatcaagaaattattaactcacaaatcagagagggggatgaagactaatggctgaaaaaacaacaaccaatcgaccccaaggtggacatggcccaggccgtggcatgggtggtgtcgttgaaaaaccgaagaatttttggggcacaaccaaacgattattaacctacatgtctagccggttaatcggattagtgattgtgttagccttagcaatcatctccgttattttccaaattagaacaccaaaagtattaggacaagcaacgaccgaaatcttcaagggtgttatgaagggcaatgccatgcaaaaagcgggcatgccgatgaatggcttaccaattgatttcgataagattcaacacattattatgacggtgattttgatgtacttagcatcagcggttttcagtttcttacaacaattcatcatgacgcggatttcccaacaaaccgtctatgaattacggaaagaattaaaagacaagatgcaacgggtaccgattaattactacgacacacactcaaacggcgatatcatgagtcgtgcgattaatgatatggacaacattgcaagtaccttgcaacaaagtttaacgcaaatggtaaccagtgctgtgacatttattggcgttatgtggatgatgctctcgattagttggcaattgactttaattgccttagtcacgattccactcagtttagtcgtcgtcgggattgtcgcaccgaaatcacagaaattcttcgcagcgcaacaaaaaagtttggggttgttgaacaaccaaattgaagaaaatttctctggtcaagtggtcttaaagaccttcaaccgcgaacaagtcacaattgatgcctttgaagaacaaaatgcattactctataaagcagcttggaaggcacaatttatttctggggtcatcatgccgttaatgacgttcgtcaataacattggttacgtcttcgtagcaattgtcggggggattcgtgtttctcacggccaagttactttaggggatatgcaagcgttcatgcaatatacgcaacaattctcacaaccaatcacgcaattggccaacttagcgaatacaatccaatcaacgattgcctcagctgaacgggtctttgaagtcttagatgaagatgacatgagtgacgacccatcagaagtgccagcgattgttgatgaccaaaatctacttgaattagaacatgtcgaattcggttatcaaggtaaagatatcttgatgaaggattacaacttgcaagtcaaaccaggtcaaatgattgcgattgtcggcccaacaggtgctggtaaaacaaccatcattaacttgttggaacgcttctacgacgtgagtggcggttcaatcaagcttaaaggtgtcgatacgcgcgatatgactcgggaacaattacggcgtcacttcgcgatggttttacaagatacttggttatttactggaacgatttgggataatttgaaatatgggaacgctgatgcttcagatgaagccattttagcagccgccaaagcagcgcacgttgacggttttgtccgtcaattacctgatggctatgagacggtcttgaatgaagaagcttcgaatatctcccaaggtcaacgccaattattgacgattgcgcgggcctttgttgccgatccagagattttgatcttggatgaagcaaccagttcagtggatacacggactgaaattcatattcaacacgccatggaacgcttgttgcaaaatcggaccagtttcgtggttgcccatcgtttatcgacgattcgcgatgccgataacatcatcgtgatgaatcacggttcgattattgaaaccgggacccatgatagtttgatggcacaagatggtttctacgctgacttgtacaatagtcaattctcaggcaacgttaaaatttaatcatgaatgacgcaaataaggccgcagataaaatctgcggccttatttttgtccgtgtttggcgtatactagtgatattgatgtagtaggaggaatttaacatgcgatttgaacaaaccatccggcaaattgaagcgctagttgatgaagggattgtccctggtgtttcttatgccatcatcgaaggccctgaagtgatgactaatgtaatcgggcaggccgaattagtgccccaaaaagtgccgttaaaagctgatcagttgtatgatttagcgtcattaacgaaagtgattggcacgacgacgattgttttgcggctattggaaaaagggcggctttctttacgaacaaaagtgcatagtttgttgccggcctttaaagatcgacgggtgacggtcttgcatctattgacgcacacgtccggtttaacgggctacattccgaatcggaatcaattatcggctgccgaattaaaaacggcgcttttgacgcaattaacggtcggcccaaattttggtgaaaaggttgtttacacggacattggtatgttgtatttgggctggatgattgaagccatctatcaaaaaccgattcaggatttgattcaagaactcgttttaaccccactcggtatgcaagccagtacgtttaatccggacaaaagtttggcggtcccgactgaattgagtgccgaacgcggcttaatccagggcactgtccacgatccgaaaagtgcgattttacaaaatcatagtggtgcagccggcttgtttgctccattaaaagacgttgtccgctttgcccagttccaattagggcagttgaaggttgaccagccaccaatcagtcaggcgagtgttaagagtctctatcgtgattggacaccaaaacatctcgggcgctcactgggctgggatttgcgctttgagccgcaagaacaccagccactgatttatcacaccggttttaccggcacgttcatgctattggatcgcaagcggcaaacggggctgattgtcctgagtaatcgcattcatccaacggctgataatccggtctttttggaacgacgggatgcgattgtggcacaatttttagcggataatcacctagaaacaaaagcctagtcaaattcgcaaatttgcgtattatccgcttacatttgtggtaaaatgggactattgataaataaagcgcattaggagtgagtgaattgacagaacctttatttctaaaacctgtttttcaagaaaaaatttggggtggtcgcaaattagctgaagccttcgattatgatttaccagacggcgatattggtgaatgttgggccatttcagcccatccccatggtcctagtaccatcgaaaatggcccattaaaagggctcacattagatcaagcatgggcaacccaccgcgaatatttcggtaatgcagaaggtaaagtattcccattgttaactaagattttggatgctgaagcaagtctttctgtccaagtgcacccagatgacgcttatgctgctgctcatgaaggtccaaccgaactcggtaagacggaatgttggtatattttggatgctgaaccaggtgcttatttaatctatggccaccatgccaagaccaaagcggaattaacagcaatgattgaagcaggcaagtgggatgatttactccgcaaagtgcccgttaagactggtgactttttctacgtcccaagtggcacgattcacgcattgaacaaagggattatggcgcttgaaacccaacaaagtagtgatacaacatatcggttatacgattatgatcgggttgatgctaagacgggcgaaaaacgcgaactacacttgaagcaatcaattgatacgacgattgtgccgcatcaagatcccgttttgaatattcaaacagaacatgttggagattcaacaatcacgacttatgtgcaaccaccaatgtcaccatttttcagtgtttaccaatggttagtgaagggcgacttacactttgatcggacaacggcaccctatactttagtctccgtggtcgatggtgaaggcgaactgattgccgatgggcaaacttacccaattaacaagaatatgcattttgtgttaccatttgatattaagtcatgggacttaaaaggtgacatgcaaattattgcgtcagaaccgggtaacaagtaaactgaatataaccaattgcaaccgcagccgtggttgcaattttttttaatgattaaaagagtaggatgacaagtatgcaaagacaaatcgaagcaattgaacaatttgtacgaacggaattggcagcagaacacagcggtcatggattcgatcacattcaacgggtcgtgaataatgcccgtttaattcagcaaaaagagttagctgcggacctaacaacgattatcttggcggccttattgcatgatgtgattgatgaaaaaatcgcgactgatgttgaacaggctcgacaaaaggtaaaaactaaactaaccgaaaacggcatacaagatggccaacaaacggcaatttttgatattatcgaccacatgtccttttcgaaaaatctcaatcaacaccaaacgctaagtttagaagggcaaatcgttcaagatgcggatcggttagatgcaatcggcgcgattgggattgggcggacctttatgtatggtggcgcacacgatggggttgcttatgatcctgagattcaaccacgggcggaattgacaaaggaaaactatcgcgaaccgtctaccgtgattaaccatttttatgagaaattatttaaattggcagcaacgatgaacacacaggcagcgcgcgaaatcgcgcaagcgcgaacggatttcatgcaccagtttgtggatcagtatttagcggagtggacagggcaacgctaaaaaacgaaacattgatatgcaaaagggcggtaacaatatttttgttagcgcccttttggatagttgtgttctgatcgtttaaacgtgttctgtaagtcatccgaacccagagccacacgctagccatcgaccgttagccagtcgttttggagtagttcgtgggttctcttttgcaggggtaaccacaattcagcgcggaggatattgatgagggattcccagaagaggcggtcctttttttgttggtcggtaatatgtaattcgatttcttgaccactttcagtggttgcgaaaactttatcatgattttcaatccgattaatttgaacggactcgactgctggcatttgatttaacataatgattcgctcctttttataggttaaagtcagtataccgagcaagtattgtgaaacgattatcattttatgaataaaaagtgtattttttcttgcgaaatgattaagacatcaaaaaagtcgaccgcataatggtcgactttttgatttgttaattttggacgcgtttgacgccggctgcatcgacttggtaacgtgattcttcgagtggtaagtcagcgatttgttgtaaatcaaattctggaaaacgccggctaaccgcaatcgataaaagtcgtttggctaaaacaccgttgtgcgtgagaattggaccatggaagtatgaaccaaatgtgtttttataaacacaaccttcggtgccgtcatcaccattgttgccgtgaccacgtttgatgtaaccaagtggtttttcatccttgcccaagaaagtccggccgttgtgattttcaaaaccgaggtaggtttcgttaaactcacggttttcgatgacaatatcaccgataaaacgattgttatcttggctcaatgtgtaatgatcaagtgcgccgattccaggaatcttgtcgccgtttgcgccaatatagtagtgacctaataattgataaccaccacagatggcaagcataacaccaccgttttcaatgtattcggtgagggctgcttttttgtcgttgaggtcttctgagatgattttttgttcgaagtcttggccaccgccgaagagaacgatatcgtaacgacttgcatcgaaatcttgaccgatactaatgacttctgtttcagtttgaatgccaacttttttggcatagtaatcaaggactaaaatattaccaagatcaccatatgtgttcattaaattgccgtatagatgacaaattcttaatgtctgggtcatactgatagtcctttcttaatataattggcagctgccagcttcttacgtagttgtaaaacagcggtataagttgctaatacataaacatgtttggttggggctgcttcaatggctgccatcgttgcatcgagttctttagtttcgtgtaattgatctgccgtgacaccagctacttttagccggaaagcgatatcgtcaccgcgttcgccaccggtaatcacggttggaatgttgtgtttgagtaagtcttcaaactcgccatcccaaatccaactcgtatcaattccatcggcatagttagcattaagcaacattgcgagtgaaaagtcttctggatcagaactgatcatttgtaagacttggtttaagccaaccggatttttaacgagtaccaatgtgaccgctttgtcttttaattgaatgacttcttgacggccaaagattcgtttgtcttcagtgaaggccttttgaattgctttcactggaatatcaaagaatcgaccgacactataggctgcaagtgcgttatagatgttgtacatgccgccaattgaaatttcaaacggttcgttgttaatttcaaagtgtgaatttgtggggtgcatctgattgatggcagtgactgcttcgtctaattcaggtcgttggtagccacaattagggcagtaaaacttcccttggctggcataactgatgaatttgtaatgaatgatgtgatcacaaacggggcacaaaacgccgtctgtgttgcttggagccatcatttcgccatctggtaagtggttgaatccgtaataaatctttggattaggaagttcaaccgatgaaaagagaggcaagtcagcgttcataatgagggttgcctcaggaacgagtttgacgcccgctagaatcatattataagtcgtgtagatttcgccgaaacgatccatctgatcacggaaaatattcgtcatcacaatcgctttgggcttgatgtagtgacaaaggggttccacattggcttcatcgacttcgaggacggccaattgccgttgtcctttttgaggatgatctgctaaaaaggcggtggtcaacccttgcatcatgttcgagccactcgaattggtcatgatatgatcgtatttttgcttcaacgtctgcacagtgagtgcggtcgttaatgttttaccattggtaccggtaatgataatcacgtcgtagttcttggttaactgctttaacacagcaggatcgaacttggttgcgattttcccggggagggagctgccacctttcataaaggtatgtaaataccaatatgaaaaacgtcctgctgtaattgcaaatgagcttttaattgtcatgcttgccaccctttcaatgttcataatcatagcataaattctcaatttggacgatataaaaacgcatctgcaaataaaataagggaaactttagaatttaatagtggcgaatattgttgcctcgctgattttcaggtatactagattaaaatgtgcttaacataggggtgtttgagagtggcgcaattattttttagatatggtgcaatgaatagtggtaagtcgattgaaattttaaaagtcgcacacaattatgaagagcagaataaatcagtgatcatcctgacgagtgggattgataatcgcgacggggtggggattgtttcaagtcggattgggctcaaacgtgaggcgacaccgattttctcggatacgaatatctttaagttggtacaatcgactaatccggatgcagcgtgtgtcttgattgatgaatcacaatttttagaacggcatcacgtaatcgaagcggcgcaggtcgttgatgatttgaatatcccagtgatggcgtttgggttgaagaatgattttaagaatgaattattcgaaggctcgaaatacttattgctatttgccaataagattgaagaaatgaagaccatctgttggttctgtcgcaaaaaagcgattatgaacttgcgaatgaacgatggcaaaccggtttatacgggtgaacagattcaaatcgggggcaacgaagcatactaccccgtttgtcggaaacactattttaacccaccggtaacacaagagagtgaaaaggaaggctagtcattcatggataaaatgtttgaacaacttgatagtttgttagaccgctatgcggaattacaggaattaatgtctgatccagaagtgatcaacgaaaccagtcggtatatggaattgtctaaagaagaagcgggtttacgggaaattgttggtaaatacacgcgtttgaagactgtcttaaacgacattgcagaaagcgaagaattgttacgcgaatctaatgacccagaaatggaagaattagctaaagcggatttaagtgagttacaagatgaaaaggaacaattagaacaagacatcaagattttgatgttaccaacggatcctaacgatgaaaagaatatcatcatggaaattcgtggggctgctggtggcgacgaagccagtctctttgcaggtgatttgttgaatatgtatcaacgctacgctgaatcacaaaactggcaaactgaaatcatcgatgaaacggctacagaagtgggtggcttcaaagaagttgcgatgatgattaccggtaaaaatgtttattcgaagttaaaatatgaaaatggtgcgcaccgtgtccaacggatcccaaagaccgaatcacaaggtcgtgttcatacctcaacagcgactgttgcagttatgcctgaatatgatggggttgacgtgcagctcgatcctaaggatattcggactgacgtttatcgtgcctcaggtgctggtggtcaacatatcaataaaacctcttcagccgtgcgaatgacgcatattccaaccgggattgtggttgcgatgcaagatcaacggtcacaacaacaaaaccgagtgaaggcaatgcaaatcttacagtcacgggtttatgatttctatgaatcacaaaatcaaagtgaatacgattcaagccggaagtcagcggttgggtctggggatcgttctgaacggattagaacatataactatccacaaaaccgagtgacggatcatcgaattggtttaacgttaaacaaattagatcggattatgaacggggaattaggcgacgtcattgatgcgttaattctttacgatcaaaccgaaaaattggagcaattacaagatggcacagctcacttatcttaaagccctgaattgggcttttttatttttagaagaacacgctaaagaacgtgaagcagcgcgctttttactactcggtcgtaaacattggacgacgacccaactggtcttgcattatcacgatgaaatgccgactgccgaatacgatcagtatcaagcagacttaaacgcgtttatcgctgatcaaccggcacaatacattttgggatatgctaatttttacggacgcgattttaaggtgacgccggcaacgcttattccacgacttgagacggaagaattggtagaatggatattagatgctacacaaccaaagaaccgaccacttaaagtgttggatgttgggacaggaacgggcgccattgcaattacccttgcctgtgagcatccagaatgggaagtgaccgcaattgatatttcactagaagcgattgctgttgcacaagcaaatgcgtgccaattaaacgcgcatgttaactttatcgtgggtgattttctaaccccagtgatgggccaacagtttgatgtgattgtgtctaatccgccatatattgcacaagatgaacggcatgtgatggatgcgtccgttttgaaatacgaacccgacttggccctatttgcagataataacggcttagcgttttatgaacggtttgctaaagaagtgcgtgcgtatttaaaaccagatgggcagctttatttagagttcggttatcagcaaaaagaggcgatcgttcggttattcgaacatgaatcgaccgatgtagcggttacaatcaaaaaagatatggctaattggtctagaatggcccgtgtgggttacgatttcaatcggaatttggtatgatgtaaatcagaagtagagtaaggaaggcctataatggaaaccaagagatacacagtagaacagattgaacaagcagcagcagatttaaaagcgggcgaattgatttcatttccaactgagaccgtctatggtcttggggcagatgcgacgaatcctgaagcggttaagaaagtttatgccgctaaggggcgcccaagtgataatccgctaatcgtgcatgtagcaagtgttgcgacggttgagcattacgcagccgaagttagtgatcgatttaagcaattagtcgacgctttttggcccggttcattgacaattattttgccgctaaaacatgcggcactagattcagttgtgacgggtggtttaaagaccgctgcctttagaatgccgaacaatgcggtgacgttagacttgattaaagcggccggtgtcccacttgtggggccttcagccaatacatcaggcaagcccagtccaaccactgccgatcacgttttacatgatctaaatggaaagattgccggtgtcattgatgatggtccaactggtgttgggttggaatcaacggtgattgatttaagtgttgcgacacccgttattttacgacccggtgttgtgactcaagaagccattgaacgtgtgattgggccgattatgacaaaccaccataaagttggcgcagctgaaacgccaaaggcaccaggcatgaaatacaaacactatgctccaaatgcacaggtttacatagtgccaacgccagatgaatttccggcggcggttaaatgggccagtcaacaaagtgtgccatttggtgttatggcggttgatacggtgttaaggcagttatctgacgttaggtttaaagatcagttctctttaggtgattctgtagtgactgctagtcaacacttgtttgaaggattacggtattttgatttgaatcctgaggttaaaattatattagtgcaaggcttcgcaaaagagggtgtcggattagcgtatatgaatcgcctcgagaagtctgccggccaacaatactttacttcgaaataggcactattttaataggaagaggagtgattgtaaatgattgaacaaactgatccagaaatttacgaattgattaaaaaagaggaacaacgccaggtgcataatattgaactaattgcttctgaaaacattgtttccggagctgttcaagaagcacaaggtagcgtattaaccaataaatatgccgagggttatccgggcaaacggttttacggtggttgtgaatttatcgatcaaattgaatcactcgcgattgaacgtgctaaacaactttttaatgcagaacatgccaatgtacaaccgcactccggttcgcaggctaatatggcagtttaccaagcgcttttagaacccggtgataagattttagggatgaacctcacagatggcggtcatttaacccatgggtcaccgtttaacttcagtgggcaactttatcacttctatagttatggcgttgctgacgataacgaacgaatcgattatgatgcgctcgctgctaaagcggatgaaattcatcctaaaatgattgttgcaggggcatcagcatacagtcggacaattgactttccaaggttacgcgccattgccgatcatgtcggtgcctatttaatggtcgatatggcacacattgctggtttagtggcaactggtgttcatccaagtccagtgccatatgccgatgtggtgaccacaacaacgcataaaacgttgcgtggacctcgtggtggaatgattttgtgtaaagcagaatatgccaaagcaattgactctgccatcttccctggtattcaaggtggaccgctcgaacatgtcattgcggcgaaagctgttgcatttggtgaagatttacaacctgaatttacagcatatacaaaacaaattgtggccaatgcgcaagcgatggctgccgttttcgaacaatctgacttagtacgtgtggtttcaggcgggactgacaatcatttaatgttactcgatttaacgcagagtggcttaaatgggaaggaagtccaagcatttttagatagtgtccacattaccgttaataagaataccattccttttgaaaaattaagtccatttaaggcaagtgggattcgaattgggaccccagcaatcacatcgcgcgggtttaaagaagcggattgtgaattgattgcgcaattaattttagaagtgattgaaaaacacgatcaattagacgccatgacgcgcattagtgcagatgttttagcgttgacggatcgttttccaatcacacaagctaaatttttagattaattaatgaataccgctagttttttgatgctatttacgctacaatagtaaacagaattttacgcggaagggagagtgactcggagaaggttttctttggagtcactctttttttgcgaaaaaaatttggactaaattcattgaatagaataggggcaaagtaaatggcaaaattcacagtattaaatcatccgttaattcaacacaaattaacgattatccggaataaggatacgggtactaaagttttccgcgaagtcgcaaacgaaatcgcagaattaatggtttatgaaatcacgcgcgatttagcaatggaagacgtagaagttgaaacaccaatggggactgcaattgaaaaacaattgagcgggaaaaaattagccgttgtgccaattctgcgtgcaggtcttgggatggttgatggcgttttagaattaatcccagccgctaaagttggtcacattggtatgtaccgtgacgaaaaaacattacaaccccacgaatactttgttaaattaccaacagatatcgatcaacgacaactattcatcgttgatccaatgcttgcaactggtggctcagcaatcatggccatcgatgcccttaaaaaacgcggcgcaacgtcaatgcgccttgttgtactagtggctgcacctgaaggcgttaaagctgttcaagaagcccatccggatgttgacatctatgcagctggtcttgatgatcatttaaacgaggatggatacattgttcctggtttaggggatgcaggcgaccgtcttttcgggactaaatagccattaattaggtaccgataataaaagcgcgcaacactttattttcctgtgttacgcgttttttttgccaaaaaagcaaccgttaataagtttaatcttttgatatgataatatttatggtatttgagtgcattgacaaaaaaataattagaaattagttagtatttgctttgtacttttaatttaatggtggtattatcatacttgtattgcggtgatgatttatgcttaatttttctacataaatattgctgtttttaggttcgttgtgcaactcgcgtagacgtagtcgttgatagagtggaatcaacaaataagcctaagggaggagggaattttgtggatgataaatatcccattattagcattttgggaattcgttttaatttagcaaactgtctatcggtcttagtaagtgcagttttggtttttgcactcgttttctttttatcaagaaaaattgcgcttaaaccgactaaacggcagaatattttggagtggatcattgattttacgaacggaatcgttaaaagtgcgatgcccggtgaagaaggtaaacaattttacttatttgcattcgtcatgttcatgttcgtatttatcagtaatcaacttggtttgattcttcaaattaaggtacatgatgtaacttggttgaagagtccaacggccaatccgattatcactatgtcgcttgcgatgatcgtcttagtgattgcgcactactttagtgttgaacggttagggtttggtaattacatgaagagttatattaaaccggtaggatttttcttaccaattaatatcatcgaacaatttaccaatttcttaacgttgtccttgcgtttgtacgggaacatttttgcgggtgaagttttactaagtttattagttaaaatggccttctcacatggaccagcaacgatgcttgtgacggcaccgatccaaatggtttggcaaggattctccgtctttatcggggcaatccaagcatatgtatttgtaacattatcgatagtctatatttcagaaaaagttgaaatggaagactaaaaattaggaggaaaaaacatgaactatttagcagcagctatcgcagctggtttagcagcattcgcagcatcatatggtaacggtaaggttatctcaaaaacaatcgaaagtatggcacgccaaccagaattatcagcagaattacgctcaacaatgtttatcggtgttgggttgattgaagctgttccaattctttctatcgtcgtttctttcttgatcttatttagttaatccgagtgaatctaaattttcgctttaaaaattagtcagtaagtcaaggaaggagtgtcaatagatgtttagtaatttaatcgttggtgcttctgaagcctaccttggagattcacttttcgtattagttgtctttattattttagtcgctttagttggtaaatttgcgttcggacctgtttcaaaaatgatgcaagctcgttctgacaaaattacaaacgacttagataacgccgctcaatcacgtgaagatgctgccaaattagcagcacaacgcgcaacagagttgaagaattctaagtcagaagcagttgaaattgtgaatacagccaagcgaaatggtgaaaaacaacgcgaaggcatggtcacacttgctcaagaagaagtccaaactttaaaacaaaatgctaaaaaagacatcgaacaatctcgtttagatgcgttaaacagtgcgagagatgatgttgctcaactatctattgaaattgcttctaaactcattaagaaagaattgtcagttactgatcaaaagtcattgatcaattcctatattgaagggttggacaagcaaaatgaaactagataaatatgcagtcggacaacgctatgcaaaggcattattttcccttgcagaacaagagcaacaatttgaaagtatccatgaagagatacaagcactcgagactattttcaatgacaacccaagattgggtgcagttctgactgatacgactttatctggattgaaacaacgtgagcttctaaagagcctttccggtgaatttagtacactcatgcaacactttttaagccttgtttttgactatcaaagaatggctgagatgccatacattattgcggcctacgaagatctttatgatcaaaagatggggattgcacacgctaaggtaacgtcagccgttgctttagatggtgatcaaatcgcaaagattagccaaagctacgctaaacgcgaaggtctcaatcaggtcttagtggaaagtatcgttgatccagatattattggtgggattgtactggaatcgaatcacaaggtgatcgatggcagtgttaaacatggcttagatcaaattaagtcattactattgaaatagtcaatcgttgataaagaggtgaacctgatgagcatcaaaactgaggaaatcagtgcattaattaaacaacaacttgcaaattataatgaagatttagccgttgaagaagtcggtactgtcacttatgttggtgatgggattgcacgtgctcacggtttagaaaacgccctttcaagtgaattgctagaattttctaacggttcatacggggttgcgcaaaacttggaaaccaacgatgttgggattatcatcttaggtgaatatgaaaacattcgtgaaggtgaccaagttaaacgaacaggccggattatggaagtgcctgttggcgatgctttaattggtcgtgttgttaatccattgggtcaacccgtggacggcaaaggcgaaattaaaacggacaaaactcgtccaatcgaaaagaaggcccctggcgttatggcacgtcaatctgtttcagaacctttacaaacaggtttgaaagccattgatgctttggtaccaatcggtcgtggtcaacgtgaattaattatcggggatcgtaagactggtaaaacatctgttgcgattgatacgattattaatcaaaaagatcaagacatgatttgtatttacgttgcgatcggccaaaaagaatcgaccgttagagcgcaagtggaaaccttacgtcgttacggcgctatggattataccatcgttgtcgaagctggtcctagtcaaccagcaccattactctacattgcaccatatgctggtgcagcgatgggtgaagaattcatgtataacggcaagcacgtcttaatcgtctatgatgatttaagtaaacaagctgctgcttatcgtgaaatttcattacttttgagaagacctccaggccgtgaagcttaccctggtgatatcttctacttacattcacgtttattggaacgggctgctaagttaagtgatgaattaggtggcggttcaatgaccgctttaccaatcatcgaaacacaagctggggacatctcagcttatatcccaactaacgttatttccatcactgatggtcagatcttcttggaaagtgatttattctattcaggaacacgtccagcgattgatgctgggtcatctgtttctcgtgttgggggcgcagcgcaaacgaaggcgatgaagaaggtttctgggacattacgtcttgatctttcatcataccgtgaacttgaagcctttacgcaattcggttcagacttggatgcggcaacacaagcgaaattaaatcgtggtaaacggactgttgaagttttgaaacaaccacttcacaaaccattaccattcgaacaacaaacaacgattctttatgcattaacacacggctttattgatgacgttccagttgacgatatcatgcaatatgaaagtcaattgagcgattatcttgaaagtaacgcaaaggacttgatggacactatccgtcaaaccgctgcattgccagatacagataagttagatgctgctatcaaatccttcacagaaggttttgtcggcgctgaagctactgctgacaatcaagactcaggacagtaaggggtgaattaattggctgaatctttaatggatatcaaacgaagaatcgcctctactaaaaaaactgggcaaattacgagtgctatgcaaatggtctctggtgcaaaactttctcagattgaaaaaaattcaatcgcttatcaacaatatacgaataagattcgagaaatcgtcacgcatttggctgcaagtcaattaattgcaagtgcacgtcaaaaaagtaccgctaaagcagcagaagctactaacggtacttcacagaaatcattgcggcatgacattacgttaagtaatttgttagtggaaagaccaatcaaaaagaccggttatttggtcatcacgagtgatcgtggattggttggcgcttataacagctcaatcttaaaagcaatggttgaaatgatttcagaaaaccacaagtctgccgatgaatatgctattttagccgttggtggcactggtgctgatttctttaaagcacggcaaatgaacttatcctacgaatatcgtggtgtaagtgatgtgccatcatttaatgaagtccgtgaaatcatcaaaacagctgttgcaatgtatgatagcggcgtgtttgacgagttgtacgtttgttacaaccaccatgtcaactcactgacatctgcttttcgagctgaaaaaatgctacctattaccgacttggatgtttcagaagtcactgataaagatcaagaatacatcacagaaccttctgttgatgatgccttagatgccattctaccgcaatacgctgaaagtttgatttacggcgcactacttgattctaaaacagctgaacattctgcttccatgacggcgatgaagagtgccactgataatgctaataatttaatttctgatttatcaattaaatttaaccgggcacgtcaagcacagattactacagaaatcaccgaaattgtcggtggtgcggcagcattagaataagaaacgcgggaggaaaataacaactatgagtatgggaaaagttgtccaagttattggtcccgttgtcgatgtcgaattttctttagatacgactttaccagatatcaataatgccttggttgtcaacaaagggaacgacgaatctgtcgtcttagaagtggcacttgaattaggtgatggggtaatgcgtactatttcaatggaatcaactgacggtttacgtcgggggatggctgttgaagacactggtcgtgcaattaacgtaccagttggtaaagaaactttaggacgggtatttaacgttcttggtgaaacaatcgatggcggcgaagaatttcctgcagattttagacgggacagtatccaccgttctgcacctaaatttgaggaattaaatacaagttcagaaattcttgaaacagggattaaggttatcgatttacttgccccttatttacgaggtgggaaaattggtttgtttggtggtgccggtgttggtaaaaccgttttaatccaagaattaatccataatatcgctgaagaacatggtggtatttctgtctttactggtgttggtgaacgaacacgtgaaggtaatgacttatactttgaaatgaaagaatcaggcgttttggaaaagacagcgatggttttcggtcaaatgaatgaatcacctggcgctcgtatgcgagttgccttgactggtttaacaattgctgaatactttcgtgatgttgaaggccaagatgtgttattgttcatcgataacattttccgattcactcaagctggttcagaagtttctgccttattaggacggatgccttctgccgttggttaccaaccaacattggcaacagaaatgggccaattgcaagaacgaatcacgtctactaaaaaaggttcagttacatcaatccaagccatttatgtgcctgctgatgattatactgatcctgcgcctgcaacaactttcgcgcatttggatgctacaactaacttggatcgtaaattaacacaacaggggatttatcctgctgttaacccactagaatcaacttctagtgctttggatccagaaattgttggcgaagaacattacgaagttgcttcagaagtgcaacacgtcttacaacggtatcgtgaattacaagatatcatctcgatcttagggatggatgaattatctgatgatgaaaagattatcgttgcgcgtgctcgtcggattcaattcttcttatcacaaaacttccacgttgccgaagccttcacaggccaagccggctcatacgtgccagtaaaagatacagtggcaggcttcaaaggcatcttagcgggtgactatgatgatgtccctgaagaagcattccggcttgtcgggaatattgatgctgcattagcaaaagctaaagaattgggttatacaccatccgaacaagaaacgaaacaagcttagaaaggggcgttaatgatggcagaagaacaaaaggtattaaccgttaatatcgtgaccccaagtgggattgtctatgatcaccacgcaacattgttggttgtaccagcgatggccgggcaacttggtattatggctaatcatgagccaattattacccctttagaaattggtgagattcgcgttaaacggactgatgatccagcacgtgaagacgcaattgcggtcaatggtgggttcatggaagtgagccataacgttgcttcaatcgttgccgatagtgctgaacgggcgcgtgatattgatattaggcgtgcgcaaagtgccaaggaacgtgctcaaaacgcaattaaaacagcgtccgaacataatgatactgacgaattacgccgggctcaaattgcactgcaacgtgcgataaaccggattaacgttaagaatcacttattgtaggattcaaagagccttaaacctgaatggtttaaggctttttttgtagccgaaaggttcaaccttttttgtagtaattaaataataagttgggagaaatcagcatgattcaaaccgtaacagaacagaacatcgcaagctttgttcaaacacaaccgttagtgattttagacttttgggcggattggtgtgcaccttgtcggattatgacaccgatgattactgaactacatgaacaattagctgatcagtttggcttaggaaccgttgatgtagaggatcaagcagcgttagctgaacaatatgcgattcaatccgttccaaccctattaatcttcaaaaatggtcaggcgacagaaaaggtaactggcgcttttccaaaagagaagttaaaaagatacttagataagaaaatcgctgaaatgtaatcagcgcattaatagtagcccgcaactttcattggagagttgcgggtcttttttgataagtagaaataaaataacccccttagctattgtctaagggggagatgattattgacgaaccatgtggataacacgttgataaaggattaatgcgccaatctcacaaagtaaaatcaaaacagctaatggaagataggtataactgcccatcacgccaactaatggggaaagaaaaatgccgaaaacatacataccaagtccaagcactgaagaagcaatccctgcatgttgtccttggcgttgtaaggccagtgaggtgacaatggcattaattagaccaagtgttgcgaccactaggaataaaccaattaaagctaaccagagacgattagagccaaagccactaattaagacgcagatggcaccgattaaaccaccaattaagccgatttttaattgttgtaattcatcaaaccaatggattaaaatggtggacatttcagccattaagataatcccaatcccattgattccgtagattagactgaaagttgatttagaaagactaaagacattttgaagcatgaaactggaacctgaaatataacagaacattgccccataaacgaggccttgaattaaaacaaataggatgaatgggcgatctttaaaaatggcttgaataccaaggcgcgattgttgtgccgattgcgcgcttgtggatactgtgtgtgtttctttgaatcccaaaatgatgcctaacaatagaagaaggccaacaatccctaaaaagccgaaaatgccttcccaagaggtgaaacggagcaaagcacttcctattaatggtgaaatgatggggaagataccgttgattgccatgagtaaggcaatgaattttgtcaattgtttaccgtcaaataaatctttagcgactgctcgagtaatgacctgtcctgcagagctcgctaacccttgaataaaccgtaaaaggaagaatagccaaatattgtgggtgactaacgataatagacacgctgtaaaagcaagggcggttccgattacgagtggctttttacggccaacacgatcgctccaggcacccatgaagatggggccaatcgcaagtccagccaaacacatggttagactcagttgaatcatggaagcagatgaatgaaaatcagcttccataatcggaaatgctggtagatacatatccactagtaggggtccataagcactcagtgaaccaagtaaaacagataaccatagtgttcttttttttgttaaaaccatgttaataaaccctcctaaataaaaaagtgtaaaaaaatagcccgttgaaaacgtagctagcgccgaacgaatttaattaattactattcatgttgcttcttagttacactaacataagaagtcgggtttgtggcgatatatgagcaatttttaatatgtaaatggtttctatttcagtttaaacaagttatgatggagataatgaaaaaagttgtcgaatgaggttttgccatgaaaattgcccaaaaaaataaaatattagaaacctgcctaattgcgggacggattatgattgaaagtggttctgaaatgtaccgggttgaagatacaatgaaccggattgcttataatgcaggcattcaaaagagtgttgtgtttacgacaccgaccggtttatttatcggaattgaaaatcaaccttatgtgcaactaggcgctgttgcggtgcggacgattaaccttggaaaagttgaaaatgtgaatactgcttcacggcaatttgcgactaaggaaattacgttggatcagttaatgttacggttaaaacaaattgatcaggatacagctcattttccgttgtggttacaaattacagctgcagcagtcatttcagcgtttttgatgattattttttctggtgaatatgattggttagacatcataccgtcagcggtagccggtgctttaggctatgccgcctttgcggcggtcaatcgggtcacaacgattcgctttatcggtgaatttttaagtgcgacagtgattgggatagtcgcctatctattaactaggtggcacttaggagtcgatatcgataatattatcattggggctgtaatgccattggtacctggtgtagcgattaccaattcgattcgagatttgctagcagggcatttattatctggtatggcacgtgggatggaggccatcctgagtgcctttgcaattggaacggggattgcgctcgtatttagattctttatgtaaagagaggttcatcagatgccatattgggttcagtttattattcaagcgttatttagttatatttcaacggttgcgtttggaatttgtattaatttaccaagacgcgcattattatggtgtggctttgccggtatggcagggtggcaggtctattggatgctctttaactttggtagcgggcggatgcttgctaatttgttgggtgcgttagctgttgggatttgtggcaatattatggcccgttataagcggatgccggtgattatctttaatattccagggttagtgcccttagtgcccggcggaactgcgtaccgtgcgattcggaacctcgtgctaggcaacttaaatgaagcttcgacacaaggtgtttcagtgatcatgattgctggtgcgattgccgttggctttatgttagcgcaaattttagccgatataacacgcaaacgagcgattacgccgaaatgggtatcgcgtcactaaaaagtatgctataataagtctatgcgatgagtcgagtaagtctcggtaggcaactattctgcgaaggcagctaggagacccaaagatacaggataccacggttattcatttaaccacttgccgtattgcaagggtgttttcgcccgctgtgttgtggagcacaaggtgtttattcttcggaatactgtaaaaaaagccccttccgtcaggaaggggcttttttttgtgcgttcattttcttgcatgacagcgttactgatggtgcgatggtcgactaattcaccaatccgttttagatgtttgagatgtgcatcgtagtgttccgaaaaaacgagcgcgtataaaacatttaataggaagatgatggaggtattaatggtaaagttgccgattttcgagtagagtttttcgcgggttgtaatcggtaaaaagcaagtgcattcttgcgaaagtcgattttcaccgatactggtaatcgcaatcgtcgggatgttgcgggcgcgtaaaatagtgttaagtgctagtaagttgggattctcgccagaataggaaattaaaatcgcacaagcatccggactaagattataggcatcgtagttttcctcgccacgaaccgcagatagcgtaacgtttttttggatacgattcattttgagggcaaaatcttgcgcgatgagtaagtttgagttttgggagaagatttgaatatgatttgccttgaggagcaatgatttagcttgactcagatggtcgtggtcgagtaaaaagaagatatcatcaatcgtcattttgtccaagaccgccattttcttacaaatagtcatcaaactatccgtactcgaaaagggcagattgggatcgatacgcgtaaaatgtttattgaggtagcgccactcttctagatagtgtttcttaaaagatttccaaccgtcaaaatggagttttttggcaatgcggaccagagtggacggttgcgtataggtttgagcagcaatttcttggatggaaagctgatcgagtgcttctggagccgttaacaagtaatccacaaccacggtttcagcgggggaaaacgcgaatgtctctagtttttctttaattaacatgtaaccgcctccttttacaaaagattagcgatatttgtaaaataagtcaatcgataccctagtgatttgtaaattaaattcgcgtttaggccattaatatcggcagtttatgcgaactcacttttaaacgagggcatagaggtggggtttgcggtttgcgttaggtatgcttaatttgtaaacaaatcaaaggaggcattcagatgacacggaaagtaaaaattgcaacgattggtggcggtagtagttacacgccagaattgatggaggggtttattaagcgctatgcggaattaccaattggtgaaatctggttagtagatgttgaagcaggtgctgagaagcaggcgattgtcggaaaaatggcgcaacgaatgtgggatgcgtccccgtatgatgttcagattcatactaccttgaatcgtgaagaagcgcttaaagacgccgattttgtgaccacgcaatttcgtgtcggccaactggatgcacgggtgaaggacgaacgcattccattttcatacggtctattggggcaagaaactaatggcgctggtgggatgtttaaagcatttcgaaccattcccgttattttagaaatcgttgcagatatgaagcgcctctgtcctgacgcatggttaattaattttactaacccaagtggcatggttaccgaggcagttttaagatacggtcaatgggaaaaggtgattggtttgtgtaatgtgccggtcgtcgctaagatgggagaggctgaaacgttaggtgtgccacagacggatttaatctataaatttgcaggggttaatcactttcactggcataaagtagctgataaaaaagggcatgacttaacgccgcaattgattgataaattatatgaagaaaatagcgggttaccgaaaaatatttttgatgttcctttctatcggaaacagttacagcaaatgaacatgatcccgtgtggctatcatcgttattattatcgtgctgaagaaatgttaaagcatggtttaacggaatatgcgactgaaggtacgcgtgcgcagcaggtgaaagtcattgaacacgaattgttcgagttgtataaagaccctgatttagattacaagcctaaacaacttgaacaacgcgggggtgcttattattcagatgcagcctgtgaaacgattgcgtcgatctatgcgaataagaatacagaaattgtggtttcaacgcgaaataacggggcagtccctgatttaccagcggattgtgcggttgaagtgacggcctatgttggtggggctggtgcgcggaatgttgcgtttggatcattgccaacagcagaacgtggttagttacagatgatgaaatcaatggaattgttaaccattgaagctgcgataacgggtgattatggcacagctttacaagcctttattagcaatccattggtgccatccggtgaaaccgcaacgcgcgtcatgcatgaactactgattgcgcataaggcttacttacctcagtttgcagacactattgcacggttggaaaaagaaggcataacgattaaggacgaagtggttcgaaagatgtagtgatcatccaaaaaaggattggcgagcagcgaatcctttttttaatccgacgaattgtcaacttaagtgcaactttttacccatgaagacttctgatggcgtcttccagcctaagaccttgcgtggtcgattattcagttgttcaatgtaagtctcaatttcctggtcgctctgaaggtctaggtctgtgttcttgggaaagtattctctaatcagtccgttggtgttttcgttagttcctcgttgttgaggcgcgtgtgggtcaggaaagaagacctttgtattcagacgttctgccagctccctgtaccgggcaaactcccttccacggtcaggagtcactgttcttactcggttagctggtaaggcaccaagcagctcaatcatgacgtctctaacagtgtcagcttttgcgttggccgttcgcttcgaaagcagatagcgtgatttacggtcaactaatgttactaatgcagagtgtcctgttttaccgcgtactgtatcgccttcccagtgaccaaaccagctgcgattttctgccgaccggggtcggtcgtgaattgatggcacgtcattgaagcgcccccggcgttcatttatggtgcctttgattttgcgcgtcttgcctcggtgtcgaagcagccttggtagcccgcgagcaccatggctcttcaatggaacgccgagattatctaggtagatacctctgtagatagtcgaatagctgatgcgaataggactgccttctagtgacaagcgaccggcaatctgctcaggcgaccaatgtagcaccgtgatatatcgaatgacagcgtcacgagtccccggtcgatcgaggatccgaggacgcctgctagccaagcgaacccgccggtagcggtcctgagcggtggctgccgaatagctccgccagccgccgttacgtgcaatttcacggctgactgtactcttggaacgacctatctctttggcgatggtatcaagagttttgcctgtagagataccaagcagtatcgattcacggtcttttaaggtaagatgggtgtacggactcatagtcgagttctccttgtagttggtcttgtggtgattccattttacaaggactcaggctatgagtcttttctatttgactaatttgttgcacttgaattgtaaatccgtccccttaaaaggcgctataatctgtaaagattgatagaatggtagcaaggggtggttagtaaatgtttgaacttgaaaaaatccagcagttgaatacattggagctatcagttttaaagtatgttttaaatcatcgcgcacaggtcgaaaaaatgacgattcgtcagttggcgacccaaacgcatgtatcgacgtcaacaatctcgcggttttgtgagaagctagggtgcgaggggttttcggaattcaagtatatgctaaagcaagagcggttggcgcaaaaaaagacatcgatgcctgaatacgatgtcatgttgccaattaccgagtttttggataaaacgaataacgaaacgttcagacagcttttatcacaagcaacggcattaattttagaggcacaagctgtctttttctttgggatcggcactagtggtgcactggctcagtatggttcgcggtatcttgccaacgctggtattttctcgctgagcatcaatgatccatttacaccggtggggatgcgagaaacagtcgtggcggataccttattagtggtgctctcggtgtcgggggaaacaactgaaatgttggcacaagttgagcaatatcaagcaggaaaaggtaaagtattggcaattaccaacagtacgcattcgactttagcgcggttagcggacgttgtgattccgtattatatgcctgaagaaaagaatggttccttgaataatacaacgcagataccggtggtttatattctagagttgctagcacatcgggttgcttgcgctcagtaagtgttgtttgaaacatgttttttttaagaaacaaataccaatcagtggtgcatgtgtttatcaccgttaaaggactagtcgcccagatggcaacgcgctatactgcaattgtggaagcgcattctgaagtggcgatgttgatcaatcgccgtgattaaatagcgaagggaagttaaacacatgaatacttggattaatactaaattaatgccacctattatgaagtttgttgcgacgcggccgattacagcgttgaaaaatgggatgctatacgtgatgccatttacaatcgttggatcgattttcttaattttagccaacttgcctgttaagagttgggccgattggatggtttcaactggtttgaccccatattggaacgttgcctataacgcatcgtttgcaattatggcgttaatcgccgttgcggggattgcttattcttgggttcaggatgaaggttttgatccgttcccagcctcattacttgctattgtttgtttcttattagtgacgcgcccaagcactgccattgtttcggcatccggtaagattgttgtctctgttaaaatgatgagtcaacaaaccgggtttattgatcggacttggcttggtggacaagggatgattactgccattattgtcggtttattagtcggttggatttactcagctttcttaaaacatgatattcggattaaattaccagaacaagtgcctgcgaacgttgtaggttcttttaccgctttgattccagccgctgttttaattagtggctcactcttggtttatatcttcttcgacaaggttgcaaactcaaccttaacagaatcaatttacaatgccattcaagcaccacttcaaggaattaccgattcatttggtggcatgttagccatttctttcttagtaccattcttgtggttcttcggggtgcatggttcaacaattgttggtgggattatggggcctttactgcaagccaactcactggctaaccaaaaaatcttggattcaggcaaagcattaacgttagctaacggtggtcacattgtgacgcaacaattacttgatcaatttatgacagtgaccggtgctgggatgacaattgggattgttgtttacatggcattctttgccaaatcagcacaattcaaagatttagggaaattatcattagcaccagcggtctttaatattaacgaaccaattttatttgccacaccaatcgtgatgaacccgattatgatggtcccattcttcgtgacaccaatgctatcagcaatcttaacgtggactgcgattcgggtcggtttaatcccaatgttccccggaacgttggtaccatggacgacaccaccaatcatttctggtttattagtcggtgggtggaagaccgcattgtggcaagccttaatgttattaatgacgttctttacgtacttaccatttattcggaaacaagatcatttaaactatgcttcagaacaaggtgcaacaactaaatagggggaaaggtcaacatgggacaacttagaaaagattttttatggggcggcgcagtggctgctcatcaattggaaggcgcttggcaagcggatggcaaagggattagtgttgccgatgtgatgactgccggggatgttaatcatcaacgggggattacagatggtgtacaaccggggcacaattatccgaaccacgaaggcattgatttctatcatcgttatccagaagatattaagttatttgccgaaatggggttcaagagctttagaacatccattgcatggacgcggatttttccgaatggggatgaagcacaacccaacgaagccggccttaaattctatgatgacctatttgacgaatgtctcaaatatcatattcaaccagttgtaacgctctcgcattttgaaatgccatatcacttggtcacggaatacggtggttggcgtaatcgcaaagtcatcgactttttcttgaactttgctgaaacggtcttcaaacggtatcgtaataaagtgaagtactggatgacgttcaatgaaattaataatcaagccaattaccacagccagtttgccttatttacaaattctgggttacagattcaacctggtgaagatgctgaaaaagtgatgtatcaagccgcccactacgaattagtcgcgagtgcaaaagctgtacaaattggcaagcaaatcaatcctgatttcgaaatcggctgcatgattgcgatgtgtcccatctatccactgacagctaaaccagaggatgtgctcaaggcagaacgcgcaatgcaaacccgttattggtttgctgacgtacactgtcatgggcgctatccagaatggctcttacaatatcaaaagaaccaacactacgatttggacattaccgcagatgatttgaaagaattggctgcagggacagttgattacatcggcttcagttactacatgtcatttgcaaccaaggacaaaggtgaaacaacgcttcattatgatgaagaacacgatttagtacctaatccatatgtcaaggcatcggaatggggctggcaagttgatccagttggcctacgttatgtaatgaattggttcaatgatcactatcacttaccagaatttatcgtggaaaatgggtttggtgctgttgatcacgttgaagcagacggccaaattcacgatccttatcggattgattatttacgcgaccacattgttcagatgaaaaaagccgtggaagatgacggtgttgatctgatgggttacacgccttggggctgtatcgatttagtttcagcaggcaccggacaaatgtcgaagcggtatgggtttatctacgttgataaaaatgacgacggaacggggacgttagctcgttctaagaaggactctttctattggttccaaaaggtaatcgccaccaatggggatgacctagcataatcatgaatagcgacgcaggcaaattgattttgtctgcgcctttttttgttgaaagaagcccatgcattattaataacccatttttctgaaataaaactgttattttatcgtgagttaacactaggcaattaccattatgaaataaattatgagaattagggcttatctaatgcaaaaataatcactatcgtttacaataagtaagtattaaaaatggaatggggtaaagaaatgacaattacatatgtcgtcatcaacatcgtgatcatgctcatcatgttatttgttttaaacaagatggcccggattcacgttaagtttagtcgccgcgttttcacggcattgggggtcgggattttattcggtgcactcttacagattatcttcaaagcagattcaacggttgtcaaacaaacagctgattggatcggcattgtcggcaacggttatgtctcgttcttaaagatgatcgttatgccgttagtcatggtttcgattattcaagccattacgaacttggaatcatctaagggcttagggaagatggccggcatggtcattggaatcttaatctttacaaccttaatcgcagccacagttggttcagtgacagcggatgttttcggcttaaatgcgagtgatattcaatcaggccaagtcgaaaaggcccgctcgaaagaattacaaacgaagctaggcgatgtacaggaacaaactgttcctgaaaaaatcgttagcttcattcctgaaaatccattcatggatatgacgggttcacgacctacatcaacattagctgttgtgattttctcagctttcttaggggtggcagcattacaattacggcgtaaaaagccggaacaagcagaaatgtttaataaaatcgttaacgccttgtacgcggttatcatgcgcatggtaaccttaattttacggatgacaccttatggggtgttagccttaatgacaacgaccgtagcacaaactaatgttaaaggaattctcagtctaggcgagttcgtgattgcctcttacgtggcattaatcatcatgttcttgattcacttcctattaattacgttcacggggttaaatccaatcaactacattaaaaaagtgattccaacgttaatctttgcgttcacgtcacggacgagtgcgggttcaattccaatgaacattgaaacccaaacgaaacgtttaggggttgaagatgggattgctaatttatcggcttcatttggggcttcaatcggtcaaaacggctgtgcgggtgtttatccagcaatgttagctgtgatgattgcaccaactgttgggattaatccttggagcatcggtttcttggttaaattaatcttgattgttgcaatcagttcctttggggttgctggtgtcggtggtggcgcaacatttgccgctttaatcgtactttcttcaatgaacttaccagtcgggttagccggactattaatctcagttgaaccattaatcgatatgggtcggacagccttgaacgttgatggctcaatgactgctggggtcttaacggctcacttattaggtaaattggataagaacaagtttaatgatatgagtttgacggaagattcagacgaaatggcttaatttcaaaaaatggagggtttagtgatgcgaacgattattatcggtgccacagctgccggaacaagtgcagctgcaaaagcaaaaagaacgaatccagatttagacattacgttatacgaaaaacgggactatgtgtcctttggggcttgtggcttaccttattttgttggcgagcactttgaagatcccaaccaaatgattgcccggacacctgaaaaatttgctcaacaaggtattgatattgcgcttgaacacgaagtactatcagttgactttgatgcgcaaacaatcgtggttcgggatttgaaaaccaatcaagatcgcacagaatcttatgatcaattaatgttagcaacgggagccacagctgtgatgccaccgattaaaaatgttgatctcaaaaacgtctatcatctacggacgatggcagatggacaagccttacgtgaattaggacaagacccaaaggttcaatctgtaacggtgattggtgcgggctttatcgggttagaaattgccgaagagttccatcaattagggaagcaagtccgggtcattcaactagaagaccgaattttaccactggcttttgatccagaactaacggacatgttcgcggatgacttacgtgataacggcattgaattacacttatcagaagctgttcaagccttagaaggaactgttcaggtgactggcattgtgactgataaggggcagtatgcgacagacttagtgattgtagcagctgggattcggcctaatacgcaattcatcacggatgatcgattgaagaagttgccaaatggtgcgattattgtcgatcaagcagggcggacatcgattgaaaatgtctatgccgctggcgataatgcaacggtcattaacagcgtgacgaaccaaccgatgtattcagcacttgccactggtgccaataaattaggccgaattgtcggcacgaatttaggcgggcaagccgctcaattaccagggatgttgaattcagccggtgtgaaattaatcacgctagaagcgggccgaacaggtttgactgaaaaagaagcggcagaggctggtattgatttcagtactgttttaatccacgacaagaaccaaacgaattattatccaggccaatcagatttaacgattaaattgatttacaccaaaacagagcatatcttaattggtggccaggtggttggtcaaaaagacgcagtgttgcgcgttgatgtactcgcaactgcgatccaagcgaagatgacaactgaacaactcgggttactcgaccttgtttatgcaccaccgtttgcaagaacgtgggatgcactgaatgtggccggcaatgttgcccattaattaaaaaaaagtgacaccgcacaaaccgtgtagtggcgctttttttgttgcatgcttaaacagttgttcatagtgtttacttgaatgtttactcgggtctgtgctaaaattgcatttagaaattaaatttttgcaaagttagttatgaattaattacgatgattaagaaaacacaaataaaaaatttatcgacaggagacagtttaatgaacaacacaaagagtttgattgcattgagttctggaattttaggggcagctgggatcggtttattgagtgcagggcaagtacaagcagcaacgacagcaaccgtcaactacgcagatggtgcaacaactgtttggacaagtccaacaactggtcaaactgctaaacgatacatctttaagggccaatcagtaaatcttttagcatcacaaaagattggcgctgaaacatggtaccgaattggaaacggcgaatgggtacctgaacgttacttaacaaccagtgacgctacaccagctgaaacaacaccagcaacagaagcacctgctgctcaaaagacagctcggattgcctatgccggtggcgcaacaactgtttggtcaacagcaacttatacagccccaacaggccaatacttaggttatggtcaaaccgtcaacgttgtgaaaacagaaactgtttctggcgaagaatggtatcaacttgaaaatggtagctgggtaccagctcgctttacaggtgatggtaagattgaagccacaccaacgcccgttgcacaaccggtagcaccagcacaacctgcaacagcgactcctgtcgaaacaccagctgcgccagcaccagttgcaacaacaccagcgcaaacagaaagcacgcctacaacaccagcacctgtcgcagaaagtgaatcaacaccagttgaaacgcctgccacactagaaagtacaccagctgtagcagaaagtagtgcgcctgctcaagcagaaagtacaactcaaacacaacaaccagctactcaagaatcatcagctcctgtccaagaaactgcaccagttgaaacaacaccagccccaactcaaaaggcaccagttgaaacaacaccagccccaactcaaaaggcaccagttgtaacgacaccaacaccagccccaacggcacctgcagcaacgactggtaatgcgcaagctgttattaatttagcgatggctcaaattggtaaaccttacgcttggggtaaacatggtccaagtagttttgactgttctggattaatggactatgtcttcagaaatgctgctggtaagagtatcggtgattggacagtccctcaagaaagtgccggttatgctgtttcattaagcaacttgcaacctggcgatttattattctggggttcacaaggtagctcacaccacgttgcgctatacattggtggcggacaatatattcatgccccacaacctggcgaaaacgttaagatcggttcaatgcaatactatgcaccaagttttgcacgccgtgtcttttaatgattgcaattaagcgaacatctcacctaggtgggatgttttttgtattttagccctaaataagctatgatatgtagagatttaaaaaaggactgacgagatgaagatagaagtacaagcatttatcaatcaaattcaagatcaaacatatttaacggatgaatacgagctccccacgccagatccttttgtggcggacggtattttggcacagttaaaacccgctattgataaagccattgaaaaacaagctttggtctctttttcggtgctgacagaatatgctggcgaacccgttaaggtgacattggaaacggggattgtgaatctaccattacaatacattaaaaaagtaaatcaattttttgaactcgacgaccaagcagaggtgaatctttatttatatgtgacatcgccactcattaatcgctcgaacatgcggattgacttaattgggacggtagcttcgtttgaagaatcggcagctgctaattggacgaagattgccgacttgctaacaaaggacttggaagccgtcgtaatcggttcacaggcgcctaaagaagaaccagtcgaaaagaaggcgcccgctaagaagaaagccgcacctaagaaaatggcaacgactaagaaaaaagcgcctgccaagaagacaacagctaaaaagacagctaccaaaaaagcaacgactaagaaaacaaccaccaaaaaaaagactacgaaaaaagcagactaatttagtctgcttttttgatggcgtctattaaaggcaagtcgccgttaacaaacgagaatttcttgtggattgtttcggtcggatgttctaagacggtgcaaatcatcgcagcgacatcagcacgtgcaacttgtccaccagatggttgcattgtcactaggccggtagcttcgtcgtttgtaagtgtcccaggacgcaagatggtccaatctaaaccagagaattcaagccagtgatcggcatagtattttgcagcgtagtacggtttaatactttcaggccatttagttcgatcctcaacaaagagtgcactgaccatgacgtagcgactaacttcagcaatcttagctgctgccatactcttaacggcgccatcgagatcaaccaacagtgtttgatcatcgcctgttttaccgccagaaccagctgtaaagacaatcgcatcatgatcggcaaatagtggtgctaaagccttaggttgtttggttaaatcgaataagacaggcatggcccctagttgtgcaagttcatccgcctgttgttcgacacgaatgccggctgtaacggtgtgaccggcagcaacgagttggctaattaggagctggccaacgttaccatgggcgccaataacaaaaatccgcatagtaaaacctccaatataaatgtgtgtgctgtccattatagtagttattgaacagtgacgcaaagatagtggatttaaaaacctgtgttgtagtacaataaaattcggcaccttgcgaaaaaatgagtgtgctttagggtatataatcttgaaagtggctgatggcaacctttaaataggcaaagctaattatgggattcgttttataaataaatctaagaatcctctcattttttcacaaagttgcttattagaatatcatgaagccgtgtttgttttgtgttatggtacagatatagagattgtgatttattggataagtagtcctatttgttaatgctatctcagaaagtaggaggagaacatgacaaatcaatatcggagcgtttttgatatcattggaccgattatgattggcccttcaagttcacatactgctggcgcagttgccattggacatgttgctaatcgtctttttcatgcaccgattaacaaagttattgtgcgttactacgaatcttttgcacaaacccaccaagggcacggtaccgattatgcaattattagtggcgtgctaggattcgatccggccgatcaaagggtaccaatggcagttgatttagcgcgacgtcaaggtattgacgttgtcttcattgaagatccagggaatagtccagtgcaccatcccaatacagcggaattaacgttaatcaatcgtgagaaggaactaacgatttggggctgttcaattgggggcgggaccatcgaaatccgccaagtgaatttgaatggcattgtgattaaaacggatggcccgttaccattggtttttgtcgaatcggaacaagaaatcggcgatgctttagaccagatatttgaaggcaactatcgtgataagcgcatatcggttaaagtgccagatcggtttttgtataaaatcgaactgattgataagccgtacccggaacagattgaacaggtccgcggaatgagccaagacgttattgtgttatagaaagtggtgggaagatgtatacaacaattcacgaattagtcgagacagcgcaagaacggcaactaccaatctcggaattgattatcgaacaagaggttgcgatgagtcacactagtcgtgaagtcatttgggcaaccatggggaaaaacttggatgtcatgattgcggccgaagaaaaaggcgtgaccggtgaaggtgttcagtctgccactgggattacaggcggtgaagcggttctgttgaagcggtatcgggaaaagggaaagtcgttatcaggtgatgtgatgttgaccgctatgcaaaatgcggtagctaccaatgaagtcaatgcttcaatgggaatcatttgtgcgacgccaactgctggttcagcaggtactttacctggtgttttgtctgttattactgagcgcttggcgcttgatcgggatgcgcagattcggttcttgttttgtgcgtcagcctttgggatgattgttgccaataaggcgatgattgccggggcaactggaggctgccaagccgaagtggggagtgctgccgcgatgggcgccgccgctgcagttgaagctgctggtggcacaccacaacaatcgtcggaagcattcgcgatggcgatgtctaatctattgggattggtttgtgatcccgttgctggattagttgagataccatgtgttaaacgaaacgtgattggggccgtcgatgccttgaccagtgctgatatggcattggcagggctaatcagcaagattccagctgatgaagtgattggtgccatgaaacgaatcggtgaagatatgccatctacattacgtgaaactggtttaggtggattagctgctacaccaaccggggttgcattgaagatgcaaatctttggtaaggataagagccttaaataaaagcgacttttaggaggaacaattatgcaaaagaaactttcaaaatccgcatacggcggtgtttcaggtgagaaatatgtaccgtatgtcaaccaaggcgacaaaaaggtcggcaacttagcgattctaataatggggagcattttagccattatttttgctgcttcaacagcttattctgggatgaaggccggtttaaccgttgcagccgggattccaggttcaattattgggtctgggttagtcggtgcctttgccaaatcaaaagggattttaggcaagaatattatgcaagggatgtccagtggtggtgaatcaatcgccagtgggatgatttatgttttaccagctattattttaattggtggccacatcaacttcattcaaggggtcatcgttggggtgctcgcaattcttttttcaatggggacagcctcattagtgcacaactacttaatggttgaagaacatggtaagttggtttatccagaagccatggcgatttcagaaaccttagttgcgtcagatactggtggcgattcgcttaaatacatgggtgttggctttggtatcggtgggattattacgatgctaacttcatcagtgtttggtgtcgtcaacaacatgattagctacgttggttcatcattttataaatggaaattagacgttgaagtgaatccattacttgcaggaattggttttatcgttggattagaagtgtcattaacaatgtttgcaggtgcgattttatccaactttgcgattgcaccgttaatcggttatttcacagatatggcgggcaacagtgcgcatgtttggaataacacgagtttagccgtgaatcaaatggccgttaacgatttatcaagttcatacgttaaatacattggtgccggaatgatgctttgtggtggtttaatcggtgcgattaaattaatcccaaccatcgtgacgtcaatcaagaaaacactagctgccaaaaacgtagcaggcgaagaaaagaatacgcttggtatgattgccattgttgttggtggtgttgggatcttcgttattggtattatcattgcgcaaaacttcttaatggggattgttggtgcattactagcagccatcttaagtttactctttgtcattgtttcggcccgggttgctgggacgattggttgttctaacttgcctgtatcagggatgacaattgcgtcattagtgattatgacggtagtcttcgtattatttggttggacggacaataaccatacgcaaatcttattaatgttcgggacattcgttgtgaccgccgttgctgttggtggtggctacatgcaatctcaaaaagtaacatatgtcattggtggttcaaaatctgaaatgatgaaatatttcatgattgccgggattgtcggcgtaatcgtaactgtcggcacaatcagcatcttatcaccacaattcgttacagatagtgcaacaccagcctttgggttgccacaagcgaacttaattgctacattaacatctgggattatgacgggtaaattaccatggatcatgattatcgttggggttgtgatggcattagctttctacttcttagatttaccaatcatgaccgttgcaattggtttttacttaccaatttcaaccacttcaatcatcttgatcggtgctttgattaaagtctttattgaaaaagcaacgcgtgatgaagcgattaagaataatcgggttcaaagtgggattagtttatcatccggtttaattgctggtggttcaattattggtttaatcgggattattctccacgtaaccggtgtgttaaaagatcgcgtgattactggttttgcgaataccaatgcaatggggattatcttattggttgtcatggttgtttcgattactgtgccacttatgatgattcataaaggaggggcaacagaagatgggacgacagaaagcggagattgatttagaacaactcatctatgaaaaaaatccgcaagttcagtttaagttacaagctggccaggtcaccattattcggccgcagaatcactggattcaacggacattacggcgtttgcatgtgaagattccgctagaaacacagctggaacttgatgattatggtagttttgtctttaggcatgtgaatggaaaacgcagtgtccaccagattggccaagcactggcaggacagtatgatgaagccggtgaatacctgtatgaacgattactcgtgtatttgaatcatctagaacacacagaacatttgatccggcgggtaaccgactaagttttattaatcaattagtgaatcacatttttaataaaaaggagtttttcaaatgacagacagaatcgaattatcagcatgtacttcaatgatggtagggaagaatgcgtcaattgatggctctacgatgatttcgcgaaatgaggatcgcttctatgcaatccatcctaaacggttcttcgtacaaccagcagttcatgatcgacatgagacatatgtttcaaaatataacggcttaaccatgccgttaccgacggacggttatcgttacacatcaacccccaacggcgatttaagtgatggtttaaatgaagaagacgggattaatgaaaaaaatgtcgccctctccgcaactgaaagtgtttatgccaacgaacgggtattagcttatgatccgttggtcaagcaaggtttagctgaagattcaatgtgtacgttggttctgccatacatcgattctgcacgtcaaggggttcaattgatgggggatttgattgctaaatacggttcagctgaaggcaatggcgttcaatacagtgatcaaaatgaagtttggtatcaagaaattgttactgggcatcactgggttgctgttcggattccggatgattgttatgcagttgccgctaaccaaattgccatcgaagatgtcgactttaatgatccagaaaattacatgtggtcagaaggtattcaagaattcgtcagtgaaaatcacttgaatccgagtgaagctgaatggaacttccgtaagatttttgggacggatactgaattagatcgtcactataacacaccacgggtttggtatgcacaacgctatttgaaccctgaaatcaaacaagaacctgaatcgagtgacttgcctttcatttgcaaggctaaccgtaaaataagtgtggaagatgttcaatatgtgttaaaatcacattataacgaaactatttacgatccacttggtaatgggacagaagaacaaaagacgatttatcggtcaatttcactttcacggacgcaaaactcacatatctgtcagattagaaacaatgtgccagatgctgtgcgtggtgttcaatggttaggtttgggggtaccaacattctgtccacacgtaccattctttacgaatgcgatggatacggatgaaagttatcgcgaactaccagcgaagatgcagttgaagaacgcttactggttatatgaagcattagcaatgattgttgaatcacactacggggcctttaagaaagctgatattgactaccaaaaagcattatcagaatgggcaagaactaagattgctacggtggatgctgctgtaaaggcggaagcgaatgccactgatttcttaacccagcaaaatcatgaaattgctgcacattaccatgaagcaacaaccgatttgttagcgcaattggtgacagaaggaacgcaactttctaagttgaccttcgtcatggataagaacctatagccaagtgcgcactttaatcatttgtcacactcttccaaggggggagtgtggcttttttaatcgatggaggtgctacagtgattgctttaaaaggaaattcgaaaaaaattattatcgcgatggtatacggttttttggcggctgtgagtgttaatctgttcttgattccggcgaagacgtattcgagtggggtcacggggattgcccaattactaacctcgttagtcagctatatgggcggctcattaagtgttgcgatgttggtctttattttgaatgtgccattattgattctggcatggttcaagattaatcatcagtacgcgatttttagtatcgtcgctgtttttacgagtgtccttttcttgaaggtcattccagtacctgttcacccaattgtcaccgaacgatttgcaggtgccttgttcgggggcgcattgattggtttaggggttggcttgtgttttaaagcgggtttttcaactggtggcacggacgtcattgtgacgttagttgggcgcttaactggtaaacgggttggtgttgtgaataatatcatcaacggaatgatcgttcttgcagcgggcatcttctttggttggggtgctgccttatacagtatcgtcgaaatctttgtttcaagcttgttgatggattatatctatattcaacaacaaaaggtgactgtgacgatttttaccaagcgacctgaagaattgaagaagcgaatgcgtgactttattcatggtgcgactgaattagatggaactggtctgtataccaaccaagaaacaacagtgatcatgacagttgtttcaaaatacgatctaacggaattaaaacgggtcgttaaggatgccgatccgaatgcctttgttaatattcaatccacaatgaacttgtggggtaaatttgaaaacgtcgaataatagtagctatcctctggaactaaaaaacggtcctttcaacaacgctaagttgtgaaaggaccgttttttttatgtggtttggcggagttgaccgtcttcgatacgccaaacgtgatcgacgagatctaaaacccgttcgtcatgtgttaccatgacagctgcgcgtttttgttcatgaactgcatcgcgaattaagtggacaatttcacgaccacgttgcgcatctaaactggcggttggttcgtctgctaaaatgagtgcaggttgattgataagtgcccgagcaatggcaacccgctgcttttcaccaccagaaagcatagcgggataactatgtaatcgatggcctaatccaagttgtgtcagtaattgttcagcggcggattgatcgcgacgacgggcgattttttgtaaaaaagtcagctgctgagtgaccgttagatagggaattaattctgaactctgaaaaataaaaccaattgattcgcggcggatttgtgtttgacgattacgattgagtgttgcaagttcttgaccggccaaggtaacacgaccggctgtgggttgcaagagcgcgcccataatcgtcaacaaagtacttttaccaacaccgctgggaccaacgatggcgctaaattcacctggctgaatcgtgaaggagacatcttttaaaatgtgattaatttgatcaccatcgggataatctttggtgatgtgttcgagtgttaaaatcggtgctgacatattaatgacctccaatagctgtgatcgggtcaatccgaatcacttgaataagggataatagggcgcttaggatggcgacggctaaaaatagaacgctggtgccgatgatcgttggtgctgtgagcataaacggcatgctggcaggcattgactgggcgatgacactaatgataccgccagccaaaagaatcgccactgccgttaacaagccaatctcagagatgatgtgctggctgagatagcgtgtggttgtgcccaatgcttttaaggccccaaagtcccgtaatttctgtagggtaatgatataaaagaaaattgcgaggacaaacagtgagatgacgtataaaaagccgatcatcaagtacaatgaactttgttctgcagagtagccagggatgttatcaatcaaggtttgtttgctgatcacttggtagtgcttgttaaccgacaagggccgtttgctagcaaacgcgttataggtcgtcttttgcgttggaaaaatggtttgccactggtggtggtttaaataaataacaggtgtatgggcataagccatctgcttgctaaagccgccgattttaaattgctgaccagtggtactgtctttaaaggtgtcgcctaattggtaaccattggcttgtaacttgctgctgaccaccactttttgggtggcttggttggacagcttttgaccttgggtgactttgggtgtcatgaagctcgtagcgtcaactgcaatgtaggcaatgtcagtttttgtttgttttttaggccgctcgatggtggcttgggtgacgttgatgggtgtcagtgattggtgtttgagagcttgccaatcagattgggtgagtgccgagcgactcaaccgactttccgaaccggcttgtaaaacaaaatgcgtcgccggcgtatttttaatagccgcgccactatcgtttgctaaaccggcagctagtccggtgatgaagagtactaggaaaacgattaaaaagatgataaaactcagtgcgccaaattttaacttattatggcgtaattcttggattgttagaaacatatgccgacctccgatgacttgttattaaggctactataacgatggttagttgattcaacaataatcaatctaagtgtttctgtgttataatgcacacaagttagtcaattgtgatgtaaatggaggctgaaagatggttaatctgcaagacagacgggttaaacggacacataagttaattcgcacaagttttattgagctcctgctaaaacacccaattaatgagattacaattcagatgattgccgaccgggctgatattaatcggcggacgttttatttgcattatacggatatctacgatcttttaagccagacagaagattttaccttaaatgagttcagccagttgctagaacgttttgagttgccttctgaaccacagattgttggccaaactttctttagatgggtcttgtcatatgtgcaagacaacgagtctatgttacgggtattgtgtcgtaatcccgattcacagttaatgaataaattagttgcgttgaccgtgactcacggcaagcgggtgattccatttcagcagccggaaaacgctgattatattttgaattattgttgttggggtctaatcggtgttttgcacactgcattgtttaaaccagcgtttgacgcccagcaattggcgctcgttgctgaacagttattgaatgcttctttacaagtcagcgaaattaaagcatagaaaaaagcccaccggtaaataaatgtcggtgggcttttttctattttattttgctttagcagcttttaattgcttgaggttaacaacgatcttgttgtttaattccgaaacgttggccttgtcggctgcatcgaaatccgtaatgctaattaaagcggagttttcatatactttttcaacagttcctgtaaatgcaccatctaggtcttcgttcactttgccggttactaaatcaccgatattgagattttctttatccatagccaaaaactccttcagacattattaaaattaccaaataaggtgataataaactatgtcatggtaaatagcaagacttactgctataaattaatcgtttgattgtgaatgaaacgaaattggctatttaattccccatctaaatacgctaaaacgaagaagtgttaccggttacaaatcaaaattgaggggaattcatatggaaccttacttagttttttcagatattgatggaacgttggtccttgaccatcaaatcgtgacacctttgaccaaacgcgtgattcgaacattacaaaaacgcgatgtgattttctatattgccaccggccgaatgtacaatcttggccgggtaatttcgcggcaaattaacgatgatgtccggattgtggcttctaacggtgctgtctttgaaaatggccatcagatgaacaagcattatttaggtaaaaaagcgctcaaagctgcttacgaagcatgcttagcagatcccaatttatctgcgcacttttttaccactgacacagcttactatacccaagaaatccccaagtttgttgcgcgcgatgcggggaatttattgttgaatgccgatattgataatcaaccggtgactgatttagaaatgttgttgaatttaagtgatcagattactaacgggattatcattggtcgcggtcatccagagagtttagcagccgctaaacaacgattaatggatcaagctgtgatgagcttgtcttcttctggtccagacaacatcgagatgattccaaccgggattgataaagccactgcaattcgccagattcaaatgattcatggcattgatgccgatcatacaattgtctttggggatgggcaaaatgatttgggaatgttgcaatcagcgaagtacagtgttgcgatggacaatgccttaccagaggtcaaagcggctgcaaattatgtaacagaaacgaatacgaatgacggggtcgctaaattcttacaacaacattttgaattagcactttctgatacagaagttggtctctaggggcttgacccgctttttatttttcgatatacttatatcacggttgttaatcaaccgtgaaatgctgttttagctcagtaggtagagcatcaccatggtaaggtgggggtcgtcggttcaaatccgataaacagcttaaaaaaagagtgtgactcgaactgggtaggctttgaggattaacagggaaaagggcattatggcgggacttgccataatgccctttttgcagttaaccggagaagactgttcgaggagcacgttaaaaaatgagtgcattcaagcttggtcaacttttgagcattaagtcgagaataaaaggcggacaacatttctaacatgttgtccgtcttttttaggcttttctggttaataaacgttcagttaattgttgtagcgttgtttttgcgggcatgtcgggtagtttcgcaagaccagcgagtgcgcggtttgtgtaatcttgtgcgagtgcttgggctttttcgacacttccagattgacggacgatgccttgaacagcgtgcacatcggcatcagtcatagctgcttgtttttccaagtagggtgctaatgtttggcgattggattgcagtgccatgattaacggaatcgagtagacgccgcgtcgcatgtcatcgagaactggtttgccaaaatcgacatcggtctgagtgtaatctaagatatcgtccagaatttggaaggcgagaccgatatttaagccgattttctcggcttggcgggcaaacttcaagcctttttggctttcgtaagcaccgatgaagcaactgagcgcgaacagttggccggttttaccgttaatttgttgtaggtactgttcgggggttaaatcgagattatatcgggttgtcatctgactgagttcaccgtcaagaatttgatccatcgtttggctgttaaattggatgctcttcaaatcgctcgcataattggctagtaacttgaagcagacaacgaataagtaatcgccagcgtaaacggcgacatctttgccgaaacgggcttgaatcgattcttgatggcgacgtaaattggaattatcaacgatgtcgtcatgaattaatgtcgcagtgtgtagcgtttcaacagcggcggctaatgcgatcatcttctgtcgatcgactgcattaaactgtgaaaataataagcagtaagcagggcggagcaacttgccgccagcactaatcatctttaaaatggcgtcggtgacggcttgatttttggtgtgaatgttgtcttcaatgagcgcaagactttgcgcaagttcggtttcgatttctggatagttctgccacatggcatgtactttcgccataattaactccttgttaaattaaatttcgtgttgggcttttaaaaaagtcagggttttgacatgttcgaataaaaaattcgcggctacgccgaccgcaattccggcgagaataccgagaaaagcaagcactggtagatagaggaggacttgccaactctgggcaatgaaactcgcgacgcagagttgaccgacattaaagagcagaccaccagcagctgagatgccaatcatactcataaagcggcggctaaattgcttgaggagtaccatgccaaagaaacttagcgttgccccagcaatgctatacataaaagtagagagggttccccctagcaaggcggataaaacagttcgcatcaccatcaataaaaagcagtcgctgaccggtagggtaaataacgaaatgatggtaattaaattggctagtcccaacttagcacccggggccacggcaaatggaaatggaatcgcgcgttcgacaaggccaataataatcccttgagcgcacaagagtgcaatatagatgtatttacgcgtttgatcgttagtcatcgctgtactccttttaaatcaggcagaaaccatcccgcccgtgtcggtcccatccttggctttaatttcaatcagtaacttgtgtggtaagcaaacaatggtttggcctggcttagaaattttgccacgcttaacatcaatctgattgaagcaattggcttcagtgacctcaatggcatgatcggttaccttaattttgttgtaatcaccgccggcatcgcgataagtgaagtggctaacaccatggtgggtggttaggttcactttgtagacggttttgccatcgtgtttgacgtaggccgtcaatacctgcgcgtttgaatccgctgcttgcgtcgtttgccattcgtgccaactaaaaacagcaactggggcaaacgatagaataaacaggccgatgactactattatatcaccagggcgaatcattttgatgtaacggttagcgcgaatttgtttaaacatagtcgtcagtctttctctctaaaatagcaataaaaggggttatgacaaaagcctgtctgtcataaccccctccttttgatagctgtgaattgcttttataatgtgctttcaaaagcattctattgcgtttagcactattagccaaacaactagctacgctagttattcgtctaattttgctaatccgcatagaataaacgcttttgacgcactcagttttataacgtgctttgaagttaactttctgcgtttagcgctgtgaatcaaatcatcgactatgtcgctaattcgcttccctgtgctaatgcttaaagtcaaaccgtttcaaacgcactcattgatttttgtatagtgcacgttgttggccgtagcgccagtgaccgagatgtttttgtaaatatggaacaacccatttatctaatccgaaggcacggcctgaaccgttcatgcaggcgagggccattggaataatccaaatgttaacccaatagaacatccctgaaaggcagaatgtgataaccattgcaacggttactgcgctcgttaaccaagtgaagagaccagcaattaaagctaagccaattaaaatttcaatgatggtcattgttttttgcatgaagaaggcgacttcttggtttggaatcaagaccttcgtgatgctgtagaaccagtggggcatcttatcgaagacgggcattggatcatgaccgaataagtaagaaaggccgaatgtgactttagcagttgctggttcagcagccccgcctgcagcggcaccgctagcagcacttgttgcatccgccgctttagaagcaccgctggtgacagctggttgaagccagtcaaaaggtaaccggagcttattggtgaaccaagaaccttcaccttgaaccttgtcccaacaatcaacaagccacattgcgcctaagaaaattcgcgcaggaactgtccataaaacattaccataccgtgaaatatgaccgcgcatcaagttgcgatcgttcttcgttctgaagaactcattcattgaatagtggaataaatcgtagccagaataaatctgaacaaaatagagcatgttgactaaatgtttaactaatgtggcaaagaacccactgagatggaagaaattcatcaagttggcaaccgcatagcgagaaccaattgaaaccatgaagccggaatagctccctttgtatgggactgttgctttaccttcttcagttgcgatgatgttctttagggctgttgcagcagatgcttcggcgccttgaacaatttggggttgaccgcggccgtcatcagtttcatcgaagaaagccacatcgccgacaacgtaaatcttgtcatcgtcaacagattgcatgaattcgtttgtcacgattcggccggctttaccggttgttaggccaaattgtgccgcttgtgaggaagctttgacaccagctgtccagattagagtggcagttgggaaagttgaaccatcatttaaatcaacatgcatttcgtgaacacctgtaacaccggtattcttgcgaacatcaattttttgtttagccatgtagcgttctgctttggctgcatcgttgcggtcgagcatgttcatgatggttggtgccatttccatcattgtaaattggatttcttcgggatcaatcttgttatcagctgctagttcatcacgccagtcgcgtaattcgccgatagtttcagttccggtaaagccagaaccaacaaccacgatattcaaaagggcccggcgtttttctgggtcgtgttcaattgccccacgacgaacaacatcgataatatgttgcttcaattcaacagcctgttcccatgaacctaaagtgaaaccatgttcggcaaccccaggtgtgccaaagtcgttaggttcactcccaatccccaacataacttgatcataggcgtagcgtccatgttcagtaatgacggttttgtttgcttgatcgatgcgggttaccgtatcggtcaccaacttaacgtttttgcggcgacagaagagatgttgcaaatcgtgttgaacgtggtcttctggcacgcggttagcagctacttcgtgtaattccgttaaatacgtaaagtaggaatgtttgtcgattaatgtaatttgataatctggattcttcttgtaatatttcgcaagttttttagtcgcatagatcccggcaaaaccggcaccgatgatgacgatgtttttttgagccatgatgagccacccctaaatgaaataaatgcgttttcaatcagtatccattatacagaataaactaaagattgtctatttattcacggataagattaatgggattgatgactattaaggaaaccgttttaaattgtgtaaaaccaaagttaatcgccgtaaaataagtgatttaaaagacttgaactttttacataaaaaagataaactgactttgtgtgaaggttgatacaaactatatgattatttatgaaaagggcgggaaaattatgaaattaagtaaagcattagctagtttatcagttgttgcaatgtcagcaatggtattagcagcttgtggtaatagtaataacgctaaagattcatcttcaaaagaggcaaaatctagttcagtcaaagaatcatcaagcaaaaaagcaaccgctaagaaacaagttgccggcggtgaattaaaagacggcacttacaacttagaagaaaagaactacgaaaataattatcgcgttaagatgtcaatgaccgttgccggtggcaaagtgacaaagacaacttacgattacgttgataaagatggcaagtcaaaacaagatgacaagacatacaacgaaaaaatgaagaaagtttcaaaaacaaatcctaaagaatatattcctaagttgaacaaagaatttacagataaaggtgcagatgtttcaagcatcgaagtcgtatcaggcgcaactcatagctcaaattcatttaagaattacgcacaacaattagtgcaagctgctcaagctggcaacactgaaacaatcgaaatcgacaatggtgctaagatgcaagatggcacatataagttagaagaaaagaattacagccatgactatcgaacagttttcacaatggtggttaaagacggtaaaatcactgaatctaaattcgataacatcaataaagatggcaagtcaaaagctgacgatgctgcatacaacaaacaaatgaagaagattgctaagactgatcctaaggaatacatcgctaagttgaattctgaattcgtcaaagcacaagaaccaggcaaagtagatgttgtttctggtgcaacagaatcatcacacagcttcgtcaactacgctgaacaattagtcaatgctgcacaaaaaggaaatacagcaacgattacagttgataacatcgtttacggtgaataaaacgggacttcggcagtcagctgccaatgaattaatgggtaactgtctgctagaaggtacgatgaagctaggacaagtcaatttgtcctagcttttttaatggaaggaagtccgagatgtcttttaaaacgtttttagaatttgtccggattgaggtcaagacagcgagtgtcttgcctttaatcttagggattgtttattgttggtacgttaatggccagctgaatccagtgacgacagttgtttattttgtcgcccagttttcgattgtattatttgtgactggctttaataatgtgatggattactacaaagcagttgatctggattatcgggcacagacgaatatcattgggcgcaaacatttgtcgccaaccaaggcgctgcatttaatgctctattttttattgttcagcatggcggctggaatttggttggtttggcaaacgaacattttattactattaatcggtggcgcctgtatttttgtggccgtcttttacacgttcgggccagttccgctatcgcggatgccggttggtgaattattgagtggtgtgacagaatcatttggtgcattttttatcatggtctatgtcaacgtaccaagcgacagcatcatggcgctccattttgattggccgacgtttacccttaaaggtcaattaccaacattgctcagtttatgcctaatcggtgtgattattgcaatccccacttcgaacattatgttggcggataatatctgtgatctagatcaagatcggcgcaatgaacgttatacactgccgcattatttaggaacaacctgggcgttgcggttgtataatacgttgatttggttctcactagtggccgttgttgtggcagtgattacgaaggtcttaccgattgaatcgttactattgttattattgattcctgtcattttgcgcaataatcgccggtttaatacacggcaactgaaggatgtcacctttattaccacgattcaaaatgcgatggcgatcaatattagcttgattgtcagcttgttattagcgattgtccgcacgacctggtggggataatccaccacattgacagtttggtcaacacatgataaaataaatgggataaacgtcaattagagaggggcttttcatatgggtgttaagaaagtcgccttagcctgtactgtctgtggctcacgtaactactatgttgctgagaacaagaatcggacagaacgtctagagttaaacaaattctgtaaacattgtgggcaatactcacaacacaaagaaacgcgctaattaggaggaaataagatgattaagttttttaagagtgttggtcaggaaatgaaaactgttagttggccagatgccaaacaaacacgtaaagatacatcaacagtcgtcatgacctccgttttattcgccattttctttggcgttgttgattttgcaatcttaaaagtactacaattatttatcttttagaactggcttaattaagtcggatttgctatactgatggcaagcaaaaaacttcgcgtggtcggagtttttttattttggtatttaaaaggagaattcacatggttgaatcaatcgaaaaaagttggtatgtcttacacacatattcaggttacgaaaataaagtgaaggcaaacttggaatcgcgtgcccaatcaatggggatggagaacaatgttttccgcgttgtggtgcctgaagaagaagaacatgaaatcaaaaacggtaaggaaaaagtcgacatgaagaagactttcccaggctatgttttggttgaaatggtgatgtcagacgaagcttggttcgttgtgcggaatacaccaggtgtgacaggcttcgttggttcacacggtgccggcagtaaaccagccccattattagacgatgaaatcacacaaattttgcgtcaacttggcatgagcacccgtcatttggatgttgagttcaaagtcggcgaatctgtgaagattatcgaaggggctttcgctggccttgttggtcaaattacagaagttgacgatgaaaagatgaaattaaaggttaacatcgacatgttcggtcgtgaaacagcaacagaattagactacgaccaagtagacgaactagtttagagtgcgacttcaggcgggatgactgaaggagcacgtttcgaaaaaagagtgcgtttgaaacggattgactctgagcattaacctaatttggcgaattggtgctacaagcgccgatttgacaaatgtagttaagcgcaagagtcagtttcaaaaagcacgtttcaacaattaaagtagggggctaggatttgtcccaagccccaacaagataggcggctgagacgaaagatgatttgtctcagccgctttttttgaacaatcaatagtgtctatttcgaaagaatgatgtgatgacgatgtggtatatcattgatcaaatattaactgcagtgggcttagtcatttttttgttagtcttactggcaggactggatttttacaaactaatccgggtttcggcacattggcgaccgtgcgcacgtttatatacaaaacaaccaacgctattcattcatggctatcgggggaatcgctattcattcggtcacttactcggacgcctacaaaaagccggaattgctaagaagagcatggtcatttgggtgggcagaaacggtcgattgcatgtggatggagacgcggcgttgcaggctaataacccaacgattcaagtcttatttgctaataaccgcgccgatgtgcaagatcaagtccgttggttagctgcgattattgaacacttaaaagaagcgtatggcgttacgcaagttaatttagtagggcattcgatgggcgcaattacggtgttgcgttatttgttgacatcagaccatgccgtggtggacaaagtgatattgttggcagcgccagttaatgatccatcaattggtccggatacaccacttgttttttggagcgagttaaccagtcgtggaccagttaaacgaacacgtaattataattatttagccgtgcgggccaagtattttccaactgcgatcagtgtcttaaacattgctggcgagttactaggaactaatcgacacgatggttcggtagcagtcgatagtagttttgcattgcgtagcctattaaaaggacacgtgcgccattaccaggagatgttagttcgtggaccgggtggagcacatagcatgttgcacgaaaatcgtttagttgatcaagccattgatgatttcttgtggcgcgattaatggaatcgccttgctttttcggcaattgcttggtatattattaaggtatgttttcatacactagtgggagaccaaatataatggccatcttaaccacatcacggacttaaggaggtatgtttcgtggctaaaaaagtagcaaacatcgttaaacttcaaattcctgcaggtaaagcaactccagcaccaccagtaggtccagctttaggtcaagctggtatcaacattatgggctttacaaaggactttaacgctcgtacagctgaccaagctggtttattaattccagttgtgatcactgtttatgaagatcgttcattcgactttgtaacaaagacaccaccagcagcagttctcttgaagaaagctgccggtgttcaaaaaggttctggcgaaccaaacactaagaaggttgcaactgtaactaaagctcaagtgcaagaaatcgctgaaactaaaatgcaagacctaaacgctgcagacgttgaagctgctatgcgcatggttgaaggtactgcaagaagcatgggattcactgtcgaaggttaattcatgcttgacactttcagtcggattttcaatgaaagttgaaaaatcaagtgggaggtcaaaaaccgttcaccacaattgcaaggaggaaaaccctaatggctaaaaaaggtaaaaattatttagaagctgcaaaacaagttgatgctactaaagcatacactgttgaagaagcaatcgacttagtaaagaaagttgattttgcaaaattcgatgcatctcttgaagttgcatatcgtttaaacgttgatcctaaacaagcagatcaacaaattcgtggtgctgtcgtactaccaaatggtacaggtaagacacaacgcgtgattgttttcgctcaaggcgaacaagcaaaacaagctgaagctgctggtgctgacgttgtcggcgcagaagatttagttgaaaagatccaaggcggctggttagactttgacgttgccgttgctacaccaccaatgatggctcaagtaggtcgtttaggccgtgtcttgggacctaaaggcttaatgcctaaccctaagactggtacagttacaatggacgttactaaagcagttaacgacattaaagctggtcaagtggcataccgtgttgataaagctggtatcgttcacgcaccaatcggtaaggtatcattcgatgctgctaaattagtagaaaactttaaagcgatgcaagacgtgatcatcaaagctcgtcctgcttcagctaaaggtcaatacattacaagtttatcagttagctcaacatttggccctggtgtcaaagttgacgttgctagcttctaagttggtaatgcaaaaagcgctcatccgaaaggatgagcgctttttttgttgctataattaagcattaatgtcgataatttcgaattttgtgacatccactaaacctttatctgtaatccgcaagttcgggatgacgtcgagtggcattgcgccgagcttcataatcggatcgaagtgagcggtgacgtggagtttatcgtgacaaatagcattgaaggccttttgatgttcaattaaagtgtcgatgggttcgttactcattaagccgccgatgacaaatggtaatgttgcgatgacttggccatcccgaatggcaacgccaccgccttggctttctttgagcgcttcgatggcaacgaccatgtcagcatcgttggtaccgactactacgaggttgtggctatcgtggccgatgctggtggcaatcgcaccgttcttgatgccaaagccgttaagcaggccaaccccgacattaccagtgagatgatgtcgttcaactacggccactttagcgatgtcttcgtcaggatgatattggaaatcaccgtctgcagtgtgagcgaccggtaagacgagattttgtgtccgactgatgctttgtaagccgatcacgtgggctttatcgcttgtgaggttgagttttaattggtcagcggtgaatgtatcgaggtgtacggtttgtaacaagtcatcaaaaccagtaactgaatcttcagttgttagtaagtattcgccgctagcagcaactttttgaccatcgatgaaggtttgattcacactgaattgttcgagatcatcaaccaataggaaatcggccttcaaaccaggtgcaatcccgccgcggtcagctaagccggtacattgggcagtgttgatggtggccatttggattgccatgatggggtcgatcccgtttgcgatagcaacgcggatactttcatccaagtggccggtttcacggagggttacggattgtaagtcgtcaccgcagagacaacagaaacgtgcgttttgcggcgtcacgcctttcaaaagggttggcatattcttagagacggtgccgtagcggagataaacatacataccgcgactgatgcgatcgagcatttcatcgacttgggtacattcgtgatcgttacgaataccagcagcggcatatgcgtttaagccttgttcttttaaagcgggtgagtgaccgtcgatgagtttatttgcgttgagtgaaacgagtaattcgtctaaaacgccatcatcagcattgacaacaccgggataattcatgaattcggcaaggccgtaagtgagattgcggtcgtaagaatcttggatttcagcagcggtaatcacagcaccagatgtttcgaggcttggattagcagcaggcacacacgagggcatggtgtacttgatatcaagtgctgtctttttggcagatgcgaccatgtattcaagcccccgcatgccagcgacgttcacgatttcgtgtgggtcggccaagatcgtcgttgtgccatgtggtgttacaagtgatccgaagacagcgggtgagacattggcagattcgatatgaatatgcggatcaatcaaacctggcacaacatattggccgcgtgcatcgataacttttggtgcaaggtagtcgtcgctgataccgaggaagcgaccattaccaatcgcgagtgtgccttcgataatacgaccattgtagacatcgacgacctttgcatttttaatgaccatgtcggcagcttgacggccagcagcttgatcaattagttgttttaaagttgttttatccatgagtaatctcctttatttagcaggtaattcgtgcattgtgaagagtaataataggaataagagcgcagcgacatacataatcggatgcacttttttacctttaccagcagcaatcatggtgatggggtaagtgatcagcccgaatgctaaaccgtatgagatattataggttaatgggacgcacagaataatcatgaaggctgcaaaagaagtttcgaattctgaccagtcgatgttggcaattgacttcatcatgaatgaacccacgatgattaagattggggcagtcacttgcgacgtcacaacggccagtaaaggtgagaagaataagcttaagacgaacatgatggcgacgaccacggcggtgaaaccagtccgaccaccagcagcaatcccagttgatgattcgatgtaacaagcagttggggttgaaccgaaaacggaaccggcaatcattgaggttgaatcggcgaaaagggctttgccgacttccttaggcatcttgttgcccttgatgaaaccagcttgttgagcaagtccgattaccgttccagttgtatcgaagaagacgctgaagaaaaagacgagaattacgacggccatttgaacattgaagacgttgtggatgttcatgattgagacaccgaaagtgggtgctaagcttggaattgaagcgatgatgctgtgaggcattgcgattagaccagtcacgactcccatgatggctgtggccgccaaaccgatgaataaagcgccagggactttgcgggctaatagagcaacggtgacgattaaaccgaagacggtcaaccaaacgtgcggatctgaccaactcgtaatggtgacgaatgatttagcactactgacgacgatgcccccttgttttaatccggtaaaggcgatgaataacccaatcccgacggccatggcggcttttaaattagcgggaatcgcgttaatcacgacttcgcggacttttaagaccgtgacaagcatgaaaaggagggaagcgacgaaaacaccggcaagtgctgtttgccaaggaattcccatgcctaaaacgacggaataggcgaagaaagcattgctgccgagtccgggtgcaacggcgattgggtagttggcgatgaaggccatggctaaacagccgaccactccagttaatgcggtggcgacaaagacggcccccttatctaggccggcgtcgcctaatatagttgggttgacgaataaaatgtatgacatcgcaataaaagtggtaattccggcgatgatttcggttttaatggtcgacccacttgccttaattttgaattgacgttcgaaccagttcgttcgtgattctgttgcaatatcaatatttttatccattatgcacctctgaattagtattttaagaaccttggcattattgtacaacaaaacaatcgtgtttttaagaaaagtgtgaaaaatatttattattttgtaaatatcgttcgtgatttggtgatgaaaagggtttattttatcaaaaaagagccattagcgtgaaaaacgctaatggctctctcataattcgcgattaatttagatggttgctaggacgtgattagcaatcgctaattcttcgttggttgggatcatcaagactttgatagttgaatcgggggtactgatttgacgggcacctgagccgttttcgttcaattcaagatcgatttgaacgcctaaaacagccagcttggcacagatatcagcacgtaaacgggcgtcgttttcaccgatgccggctgtgaaagtgatgacgttcgcaccaccgagttcaacgtggtagctcgcgatgaacttcacagcagaagtgatgaacatgtcgtaggcgagtttagcccgtggattggtagcgcgtgttgattgaatatcgcgcatgtcagcggaaacgcctgaaacgccgagaatccctgatttggcgttcaaaagcgtgatgacgtcatcggcactcttatccaattcgttcattaagaatgggacgatggccgcatctaatgaaccagcacgagtgcccattggaacgccttctaacggtgtgaagcccattgatgtatcgacaggcttaccattttggctggccgtaattgaagaaccgccacccaaatgaagtgtaattaattttaaatcggcaacgggttctttcaaaaagtcagctgttgcttgtaagatatagctgtgactaatgccgtgttcgccatacttgcggatttgatagtcttggctgtattcataaggtaagccataaaaactagtttcatctggcatatcgagatagaattgactatcaaagacagccacttgagggacattagttggtaaaatatgcatcaaggtttcaatgcagtcaacttgcacgggattgtgtaaaggtgcatacttgtcgagttgttttaatgtatctaagttggtgcgatcaataatggttggtttttcgaacgtggtagcaccggcaacgacccggtggccgactgcaatgatgtctgcgggtgaatgaatgatgccattgtcttcaagttgtttcaaaagtcgaagaacaccatcttcataggaaagattagcaatggcgacttgttctttttgaccttggaacttgaaggtgaagctagcttctggtgtgttcatgcgttccatgagcccgcttgccagtaaggttaaatcagattgttggaatagttgccatttcaatgatgaactacccgcgttaacgactaaaatattattcaaaaaactgcacctcttacgattaattttcttgatagtctcaattttaaaccgttttttcagaaaaataaaataagtaaaacgtaatgctaggataactaaaattaagtgccgataatgattgacgctttatggaatccatgctatatttgtagttggttatttatgctaccgaagactcaggtgccaataggcttaatatcctgccgaggaagatacgttgaaatccctctctatgtcttggtggacatggagttttttatttttataaggaactcttgaccacaagttttacaaatctaatggaggtgaatcaattgagcgaaacaatcattgcaaaaaaagcacaaattgttgacacagttgttgaaaaattcaatagtgctgtttctatcgtcgttatggattaccgtggcttaacagtagaacaagtaactgaattacgtaaacaattacgtgaagctggcgtacaaatggaagttgttaaaaacacttacttgcgtcgtgcagcagacaaagctggttacgaaggtttggatgatacattcacaggccctacagcagttgcattttctaacgaagatgttgttgcaccagctaagatcatcgctaactttgctaagagtgctgatgcacttgaaatcaaaggtggtatgattgaaggtaaagtggcaacacttgatgaaatcaatgccttggctacattgccaagtcgcgacggtttattatcaatgttactttctgtattacaagcaccagtccgcaatgtcgcatatgctgttaaagcagttgccgacagcaaagacgaaccagctgcataatttaaaattgtgtagttaaaagtgttatcaaaaaatattacccacaaaatggaggaaacaaaaatggcattagacgtaaatgcaattgttgatcaattaaaagaatcatcaatcttagaattaaacgacttagttaaagcaatcgaagaagaattcggtgtttctgcagcagctccagtagcagcagcaggtgcagctggcgcagacgcagcagctgaaaaagacagctttactgttgaattatcagaaatcggccaagaaaaggttaaagttatcaaagccgttcgtgaaatcacaggcttaggcttgaaagatgctaagggcttagttgataacgctccttcagctcttaaagaagacgttgctaaagacgaagcagaagaaatgaaagctaaattagaagaagttggcgctgtcgttaacttgaaataatttaaatagagcgcccttggcgcttgtttagattttgagcactaacctaaaatcgggcatcgcggcgatctaagccatgatgcccgatttgtagttaagcgcagaaatctagcgccaatggcacgtttcaaaataaagtgcgtcattaacgggttatttttgagcatttgcctaatcagccggtgatttgactgatgtagcaaagcgcagaaagcagttaatgaaagcacgttttatttctaaaagaaccccactaatgtggggttctttttttacatatttttttgtaaaacataaatggcgagttgcacaaaataacacgatgctaaatatggattccatatcttaagcgacagccattgctgttgagaactaaaaaggcaatcagaggatattgattgtcgggtgaacgggaatcggattgtgctccgggtaagtaataagcgaaaatcataatctaacagccatctaacataattgtcattttactgtgttttgccttgggatagcttataattaaattaattaagttaaggagcggttgatatgcgaaaatggggcaaacacatatatgaaggaattcagcgacacctaacgttgttaaaaggcatcttcatcctttcggtgatggtctttgttatcctagaagtcggccggattttccgggacttgaacggggaacaattgaaagcgagtttaacgacacaaagtccgtggaccttgctagcgatgctggtgattgggtttgtggcggtcttgccaatgctcaattatgatttcgtgattgcggagttgctgccggaggactattcattctggtataaagtcaaatctggttggatcgtcaatacgtttacgaacattgccggattcgggggcttcttaggtgcgagtttacgggccaatttctatggtaaaaaagcgtcacaaaaagaaatcttaattgcgatttcaaaaattgcgctgttcttattagccggcctgtcaatctggtgtctgattagtgtcgttttgatctttggctttggtattggtgggatgtatgccaactactggttatggctagtgggcggttcgttgtatttccctggtctgatgattagtacgcgctttaaaaatgcggcctttttcaaagatctttcgatgcaacgcgttttacgcctaacattagggtctttcttagaatggggttttgcgggcggctttttcttaacgattggttatttcttagagattaagggtgacttattacaagtcttaccacttttcatgattgccaacatcattggtgttatttcgatggtaccagggggcttaggaacgtttgatttgttcatgatctttggtctgagtgcagtcggcgttcaaaatgcggacgccgttgtctggttgtcattttaccgagtcttttattacatcgtgccgtttttagtcggcgttggtttatttactcacgatgcaggcagccggttaaatcattatttacagggcttacctcggcaggtgatgcaaaaaatcgctcatcacttcattgttttcttcctttatatttcaagcatcattctattattagtagcaactgtcccgaactttgcgattaccaacacagtgattggacagctctacccatacacgttcttcttcttagatcgtgtgacaaacatcattgtagcgtttgtcatgttggccttagcccgcggcgttgccaaccgcgttcaaaaagttttctggccgttgatggtgctattggtgattgcgattaccaatacactatggcgggatttctcaatcaaactcgctgtctttttaacttttgtgctcgtagctagtttcttattgaaacgcgaattataccgtgaacggatcgaattttcatggaatgatcggattgtggatggtgtacttttcgtgggcgccttcttgttatacggctttgttgggattgccaattcgccacacttacggcatcgcaaacccgtaccaacagcgcttttatttccatccgaaagagtctggttggctggttttatcgggatgttggttgccgcagggaccttatatctcgtctaccgttatctcagtcgagggggccgttcaatagcagcgccatatgatgaagcacgaattgctaacgtgattaacacttacggcggcaatgaggtcagtcatttggcatacttacgggataaatcagtttatttctatcaggaagaaggagaagatcaggtattcttgctttatcgtaaaaaagcggatcgcttaattgtaatgggtgaaccagtcggaaatccggctaaaattttaccggcaattgaacagatgatgcacgacgctgatttgattgattgtcatttagcgttctacgaaatttcaagtgaattaacgatgcaactgcatgaaatcgggtttgactttatcaagtttggtgaagaaggctacgtccgtttggcggacttcacgatgactggtaagaaacggcgggctgaacgcgccttaatgaataagtttgaacgtgaaggctatcaatttgaaattttaaacccaccatttagtgccgaattaatggcagaactcaaagcggtttctgatgattggttgggtagtcgcgttgaaaaaggcttctcgttaggctttttcgatgaagcatacctccaaaaagccccaattgcagttgtctataatgccgatcaccaattaattgctttcgctaacgaaatgccaacaggaaccaaagaagtcgcaagtattgatctaatgcgtcacagacaagacgcgccatctggtataatggatgagatctttattaatctctttgaacaaaatcgaacggatggctacacgtacttcaacctcggcatggcgcctcttgcaaatgtagggacttccgagtttagctttattgaagaacgaatcgctcatctgatctatgaatacggctatcacttctacggattccagggattacggacctataagaagaaatatacgacggaatggcgttcgaaatatatcgcttatcaaaaacggacctcattaattttcacgatggttcaagttttaatggtcgttaatcaacgggttgcggatcaaccgcatcctggtggcttgctaggtcgtttgatgaagtcagttcaaattgggaaattttcagataactaacgacaaatgaggaaaaaagatgacagagtattactattctaaaaatccagacgttgaacacgctgagcggcaatggacgtttgaattacgcggctttaattttaaatttataacggataacggggtattctctaaaagcactgttgattacggttcacgggcattgctagcagcggtcgatctgagtgaagcgccagctggtccagtgcttgatatggggtgtggatacgggccaatcgggatgacgattgctaagctcgcaccagagcgccgaatcgacatggtcgatgtgaatgaacgggcattggatttggcacgtaagaacagtgaattgaatcagattaccaacgttactgtattcgaatcagctgaatatcaaaacgtaacggatcaatacgccgccatcttcaccaacccaccaatcagagcgggaaaagatgtggtgcaaaatattttgactggtgcctatgatcacttattaccagatggtgaattgaacgttgtgatccaaaagaaacaaggtgccccatcagcgaagaaaacgatgatgagcatttttggcaacgtgcaaattattcacaaggataaggggtattacattctccaaagtattaaattaaagtaaggaccggggttgaaagcggtaaattcaggcgaattgtgctaaactatgattaaagtacaaggaggttgatacgatgaaaaccagatataaaattttaatcggcgtaggggtgactgcagcagttggcgcaacgaccgcttttgtcggttctaaggcagtaatcgataaagtatcgcgctatcgcaaacgattagcagttaaaagttttgtaaaagacaaattacatggtaatcaaaaggcgttagagttggtcgatcaactctccgatgcggatgtgaataacttgttgactgcggcagacaggttaacccaattaaaagataagctcggagaacacgcagacaatctaccagatatgatggatgatttgcgccaaacactaatggcttacgcaacaaaggtgaaagaaaaactatagagtgcgactcgagttggtcaggctttgagcattaacagtgaaatgagcattatggcagtccttgccataatgctcattttgcagttaaacggaagaggatggcttatggagcaattaaaaatggtatcgacaatccgtcggcaccatttttaattgctcgactagcgcgactgtgttttaatagttgagaagtaaaataaaggggcgactaacgcgtgagtgaaacacaacaagagatcgatcaatggatgcaagccgccatcgatgaagctaaccaagcacgcatcattggcgaggtaccgattggcgccgtgattgttaaagacggacaaattattggacgggggcataacattcgcgaacacgcgcaagatgcgacgttacatgctgaaattctcgcgattcaagaagcctgtatggttgaaaagagttggcgtctggaagataccgcgatttatgtcacgttagaaccatgcccaatgtgtgcaggcgcgattatcaatagccggattcccaaagtttattttggcgcgagtgatcctaaggctggtgtgaccggcacgttgatgaatttattaactgacaaacggttcaatcaccaagctgaagtggttggcggggtgcgagaagctgaatgtgcgagtttattgcagactttttttagaaagattcgcgaaaatcgccgtaaaaaaaagaaaatggctggtaattaatgcttgaatcaggtagaataggaattgccgaaaggccttgagacaatgatgagcctacgaatcgtgtcaggttcggaagaaagcagcactaagtttgttttatcatgtgtcttaagttttgtgaaaattaaccagacccaacggacaattaattttgtcggttgggtcttttttcatgcaacgcaatcaaaattgacggtaaaatatgctaaaatggaacaagtagttttaaatgaatcggactttaaattgcaaaggtggaggtcattaaatgagctatcaagctttataccgggtttggcgcccgcagcgtttcgatgacgtgattgggcaagaaacaatgacccaaacattgaaaaatgccattatgacgcaccaaacaagtcatgcttatttatttacaggcccacgtggaacagggaaaacatcggctgccaagatttttgccaaggcaattaactgtcattatcaaaaagatggcgaaccatgtaatgaatgtgagacatgtcgggccattacggctggcgccctcaatgatgtgattgaaattgatgcggcgtctaataatggggtcgaagagattcgtgatattcgggataaggccaaatatgcgccgacccaagctgattataaaatttacatcattgatgaagtccacatgttatccactggtgcgttcaatgcactgttgaagacgttggaagaaccaccaacaaatgtggtattcatcctcgcaacaacggaagttcacaaggtgccagcaaccatcatttcgcggacgcaacgctttaattttaagcggatcacggccgctgatttatttaagcgaatggcttatattttagatcaaaaggaaatgacctatgatccagcagctctgaaagtgattgccaaagctgctgaaggtgggatgcgggatgctttaagtattctcgatcaagtgttatcctttagcgacaatcacgtcacgttggataatgcgttggatgtgacaggcagcttaaccgaagcgttgttggcggattatgtccaaacaattcaggataatgcgcctaaacaagcgttgcaattgttgcaacagattttggctgaaggtaaagatgcccaacgttttgtggaagacttaattgaatatgtgcgcgacttactgttgtatcaacaagcacccgaattagtcgccgcaagtgaaatggatctattggatgaacacttcaaagcgctcagtgcagcgatgccggctgaccgtttgtacggggtgattgatatcctgaatgaaacgcaacagcaattgcgtttcacgaaccatccagaaatctatctggaagtcgcaacggtccgcttgacgcaagtccagacagcccaagtaacgactacgatggttgccgcaccagctgctgataatgaacaagtcgcagcgttgagtcaacaagttgcacaattacaagcggcgttacaaaaattggaagcggcgggaccagtgagtgcaccagctgccaagccaaaggccaaacctgctaagaagattagtaaaaaggtcaaccgtaaggcgatttatccggtattggcagatgctacgcggaccaatttggagaatctcaaagaagtctggccggatctgttgaatatgttggacgttaccaagcgcgccgtgatgaaggtttccgaaccggttgcggcgagtcaaagtggcgttgtcgtcgcgtttaactacgcgattttattcgagcgagctagcaatgatcaagatcttttgaacattttagaaaacggcttgaatcgtttgactggcaaccccttcaaggtggttttagtgccccacgatgtttggccagaaattcgccaggaatatttacagaatcacgcagtaccaagtcaacaggtaacaactgatgacgaagcagaagcaacgccgaaaccagaacaaaaaccggccgttgtcgaacaagcacaagctttgtttggcgatgcggtggttgttaaaaaagattaacgtttaaatttgaaaggaagtaatgaagatgcgcggaatgggtaatatgcaaggtatgatgaaacaaatgcaaaagatgcaaaaagaaatggggcaaacacaagaagccctcaacaatacagaatttgtcggcaaagcagccaacgatttagtcgtggtcacaatgactggcgacaagaagatgaaagacattgccattaaaccagaggccatcgatccagatgatgttgatatgttacaagatctcattatcatggcaactaacgaagcgatgactgaaatcgataaacaaacacaagcccaaatgggtaaatttactaaaggcctcccattttaagtgagacattaaggaagtgcattgatgcaatatccagaaccaattgcgaagctgatcgaaagctacatgaagttacctgggattgggaacaagaccgcaacccgattagctttttacacgattgatatgaatgaagacgatgtgacgaatttcgccaagaacttaatttcggcacgtcgtgatctgcattattgtagtgtctgtggcaacattacggatgaagatccgtgcgaaatttgtcgcgatacaacgcggagtcaggacatgatcttagtggttgaacaaccgaaagatgtcatgtcgatggaacggatgaatgattatcatgggctctatcatgtcttgcatggggtgttatcaccgattgaaggcaaggggcccgatgatattaacatcgccaatttgattaaacgattgcaaaaaacaccggctaaagaagttatcattgctactaatgcaacaccggagggggaagcaacggcaatgtatatttcgcggttgattaaaccagctgggattaaagtgacgcgtttggcgcacggtttatcagtcggtagcgatattgaatacgcagatgaaatgacgttgttaaaagcggttgaagggcgtcaagaaatttaagaatggtgggtttgcgatgtttggtagaaaaaaaccgacattaaaacaattaggtgatcaagccttattggatttagtgtaccaagtcaaagataagtggcagatggcccaaaagacgcaagacaacgtccgcggactcgatgaccaattagagatggaaagtaagattcaacaagcaaagtttgaattcttattccgccaagcccgccaacgtaaagtagcaggcgaagcagtttcgaaagaagcagcaaccagaaatacatttagatagcgcgggtattcagatgacagccgcagcgtgaagacaaggtcgagtgactttgtctttttttgtttcaaacgtctgctgtcgcacgctaaacgcaagaacataaccgccggatacgcactcttccctttacgtcttttgttgaatcaagtaaaatggaagtaactctatggatgaagaaggttgttttgtggtaggaaaattaattacgtttgaagggccggatggtgctggtaagacaagtgcgttgatggctgttgtaccgctacttgaatccaagtgcaaccaagacatcattgttacgcgcgaaccaggtggcaatccgattgccgaaaagattcgcaatgtcattttagatgttgaaaatacggcaatggatgaccgcaccgaagcactgttatacgctgccgctcggcgacaacacattgttgaaaagattgaaccagcgttggctgataacaaaatcgtgatttgtgatcgatttgtggatagttcaatcgcttatcaaggggcaggtcgtggcatcggtgaggaagccgttgcgcaaatgaacttatttgccactaatggattagcgcccgatttaacgttataccttgatgtaccatctgaagtcggtttacaacggattaaacagaatcgacaggatcaatatgatcgattggaccaagagaagttggcttttcaccaaaaagttcggcaatcctacttacaacttgcgcaagataatccagagcggattcaaacgattgatgcgaccgcagacttagacatagttgttgccaaatgtctgcaagtgattgaacaacgatatccagacttattcacagcatagaaaaggggagattgaaatgaaattacttttagcaattgttcaagataaagatagcaacttattaagcagcgaattaatcgatgccaacattcgggcaaccaagttgtcaacgactggtggcttcttaaaatctgggaatacaacgtttatcgtcggaattgaagacgaacgggttcctgaagcgcttaagattattgaaaaaacgtgtcaggcacgcgaacaattcatgacaccgcctgttaatatggatgccacgatggatagctcaatgtcatatccgattgaagtgcaagtcggtggggcaaccgtctttgtgatgccgattgaacagttccaccgcttctaatcgatggccagtttaacaattgaacagcttcaacccaaacttgtggcccagtttgcccagattatcgcgcgtggacagatggcgcatggttatctattagctggtgcacagggattggggaagacacaattggcacagtggttggcactgcgtctgttctgtcaacaagtgacaccagatgggcaaccttgtcggacatgtccggaatgtcagcggattttgacgcataatcatccggatgtcattgaaattaagccggaaggtaagagtattaagattgccgatattcgctatttgaaacaagaagtggctaagagcgggatggaatccagtcaacgcttattcattattgaagctgctgaaacgttaaccgccagcgcggctaatagtttgttgaagttcttggaagaaccggcgcaaaatgtttacgcgattttatgtacgagtaataaaaatcaaatgctccccacgattttatcacggcttcaagtgattgatctggcagcattggcaccacaaatggtgcaacaacagtttgaagcagctggtattttgccacaacaagcgcagttattggtgcatttgacgagtgacttaactgaagcacagaccttattggcggatgattggctattacaagtcagtgcgaagcttgccgcgtgggcacaaaaagttgaacaacgtgatttagaagcatttgtacagattcagacgcaaattttaccattattagttgatcgccaacagcagaagacctttttaactttggtgggcttatggtatcaagatttattgaattaccgctatgaattaggcgtcacaccttgttttggtgcgtacgaaagccagttaaatcaggccagcgccgtgttgactaccacgcagttggtcgctcagacggaatatgctttacaagcacaacgcatttttgaacaaaatattagttgccaaaacgtcttagagagtttaacgttaaagttaattgcatagtaaaacgcataaccagcgtatcgggaggatatcaacggtgagtaaagacttatatgaacagttatcagacattgaacagcaagctaaattgacgtttgaggggctcagtgaaatgaaagcagtccttgccgaagtccttgagaaaaacgctgaattaaagattgaaaacaagcacttgcgggaacatttgcaagaattggaaccatcagccaccccgcaaacgggtaaggaaggggctcaagccctttcgaaatcaaaacaaaacttacagaatctttacgaagaaggcttccatatctgcccgtacttttatgggtcacgacgcgaaaataacgagccttgcgcattttgtaatgatgtcatctacggcgaacgaacaaacgattaaaaaaggcagggcaaaagggatgcttacttttggcctgtctttatgtcattattgatgcatcttgaaaggatagaacatgcaaacacaatcaagttttaaaacgacggaaacgggaactttatttttagtaccaacccccatcggtaacttaggcgatatgacctaccgggcaatcgatacattgaaatcggtcgcactgattgctgctgaagatacacggaatacgcagaagttattgaaccactttgagattgaaacgaaacaaattagtttccacgaacacaatacgcaacaacggattgaaacgctgattgaaaaattagaagccggtgacgatattgcgcaagttagtgatgcggggatgccatcgattagtgatcccggtcatgagctcgttaaagcttgtattgaagcgggcatttcagtggtgccattacctggagccaatgccgggattacagcgttgattgcttcgggcatcacaccacaaccgtttacgttctacggttttttgcctcgtaaaggcaaggagttaacggaagccgtaacgacgttggcacaaaagcctgaagcacttatcttctatgaagcaccgcatcgtttgaaaaagacgttgcaagctttgctcagtacgtttggcgccgatcgtaaagtcaccttggggcgcgaactcacgaagaagttcgaagaattcattcgtggcgacctagaagaagtgcttgcttgggcgactgaaacagaattacgtggtgaatttgtgatgatagttgctggaaatccagcaccagatgcaacggtcagtgcagttgcaacggaatcgctatcccttcctgaacaagtggaagcccagattcaacaaggagccagccccaacgtggcgattaagacggtcgctaaggcaaatggcttgaaaaagcaagtcgtttataatgcctaccacgaattaacagaatagaggtcacgccatgccaggaaagcaatattcagaaaactatcaaattccgtatttcgaaacggatatcaagggcgaattaacgctcgcatccttagtgaacattttaattttagcatcagagcatcaactcaatgcgctcaacgtcggtgaagcgacaatgcatgcgctcaatcttggttgggtggtcacgcagtatcaaatgaagattacgcggatgccgaaggtggatgaaaaagttagaattgtgactgaagctgagagttacaacaagtatttctgttaccggaatttctggttatatgatgaagccggcaacgaatgcgtcttcgtccaaagcatcttcgtgatgatgtcgtatgaaacacggagtatggtgcaagttgtgccggaaatcatggcaccattcgagtcaagtgagattaaaggtagcaaacgattcccacggattaagaagattgatcccgaacaagtgacgaccaaagaatatcgtgtgcgttatttcgatattgatggtaatcaacacgttaataacgtccattattttgaatggatgttggatgcgctcgattatgacttcttgacgacacaccgcgtagcaagtgtcaacatccgctacggccacgaaattcaatacggtcaaatgacccaaagcatggtcgaacaactcacagttgatgatataatcacaacacggcataaagtcgccgtggatgacctaagtgcagcagaagcggaaattacgtggaaagagcgctgagtcgaacgggttggctttgaggattaacgggataattgggattatggcgggtcttagccataatcccaattattcagttaaccggaaaaggcagttcgaggaagcacgtttaaacgaaagaaagccccattcacagataaagttgtgatgggctttcttttgttatcttcgaatatttattgaaacgtgctttttgaaacagctccctgcgcttaacccaatttaccaaatcggcgatttcatcgccaattcggcaaatccagttaatgctcagaagctaaccgtttcaaacgcactctatcgaaaacgtgttttcatcaacagcttcctgcgctttgctacacttatcaaatcggcgcttacagcgtcaattcgctaagttaggcaagtgctcagaagctaaccgttgatgacgcactctatgatgttgcgttgctgacaaattcttttaatgctgcgcctgttttgcctgcgctgaggccgacttgtagtttgaggcgtgcttttggtccattgaggccttggcagaaggtgacgcccatttgtttaagctttacaccgccgccttggtaatcgtagacgtcttcggcaatcccgttgaaacagcgagaaacaagtacgatggggatgttgcgatctaatagcgcttgaacagcgggtaaggttgctggtggtaagttaccagccccgagtgcttcgataacgagccctttggtgttgggttggttgatggcgtcgaataaagtcccatccatgccagcgtatgcttttaaaagataaacaggttcgacaagggttttgatgtcgcaaatttcagaacgaattaattcttggaagaaattcgcattgtgtttgctgaccaaaccgatgggaccaaaagttggcgttctaaaggttgcgacgttcgtcgtgtgcgtcttcgtgacataccgtgctgtgtgaatctcatcgttcatcacgactagcacacctttatcatgagcatcgtcagaagcggctgtccaaacggcactaatcaagttgtgtaatccgtctgcgccgatttcattcgacgagcgcatcgcaccagtcacgacgacggggatattgttgggaagtgtcaagtctaagaaataggcggtctcttcgagggtatccgtcccgtgtgtgacaacaacaccatcaatcccgtcttcttcagcttgttgaattcgattcttaaggtttaacatcacagcgggtgtgatgtgtggtgaaggaagattggcgaactcttcactttcaatgattaattgattatcgaacagctcttcaaagccggccattggattttgatctgtgggtgcaaccgcgccatcttcgtccgcagacattgcgattgtgccaccagtatggaggactaaaattttcttcatgtttaatgaacacctttctttaaatccgaattactcatctgtaagtatagcaaattttctgcaagagttgctgaaaaacgaaaataaattgcttgtaattaaataacgttagtgatacatttaaggggttctaaaaattcggagtaggactgaagcgttaagtgctggtggaacggaatgtgaacaccagacgaaaagcagcaatgcttgcgatttcagtaccgcattcgccgcagtattatttgtggcagctccaaaagggagatgctttttatggttaatggtcagatttttggtgttaagctagacactagacgcgttgttttactagctgttttaattgctttacaattggtggttgcacgctttgcaatttcactaacgattttcagaattagttttggattcatcgtcaccgccttaatggggtggtggtttggcccagtttgggcgggacttgccgccgttattggcgacctcatcaatagtttgatgattggggtcccaggtggttatttcccaggcttcacactttcagcgtttctaggggctttcatctatgggtgttacttctaccgacaaaagattacatggtggcgcgtgattgccgccgttgtgacagttgtgctgatcgttaacctcggtttgaattcatggtgggtgtcgattattagtcatacaccatttgggttccactttacggcgcgggccattggggaagctgccacattagtgattcatccgattattctatacatcgtgatgcatttcgaaccgattattagattaaaagatagagtattataaatgagtaggtgttatctatttgaagataacgcctttttttgtggaaaccggctttttatgctagaataacaaggattataagcagaagaaggatgaaataatgaagctattggcaatggatacctcgaatcaagcggtgagtgtggcactccttgaagatcatcaaattttaggcgaaatgactgttaatattcgtcaaacacatagtcagacgttacttccaatgattgatcaactattaaaacaaacaaaaaccaccattgaagatatcgatcgctttgtcgttgcagaaggtccgggttcatacacgggattgcggattgcggtgacaacggctaagtcttttgcttggacgcttaataagtcattggtcgggatttcgagtttagcattgctagcggccaatgtgatggatacgaccgccttgattgtaccgctgtttgatgcacgccgcgacaatgttttcgcggggatttatcagtggcaaaatgggacattgcaaaccgttgtggccgatcaacacgtttcactagaagcactactggcacaattacaattattggcagaacctgtttattttgtggggaatgacgttgcacactttaacgaacagattcaagctgcattaggtagtaacgcgcatttcgtgtccgccaaccataatttaccgcacgccagcgtcttgggtgaattaggtttgatggctgaacctgtcgcggatatccatggcttcggacccgtttatttacgcaagacggaagcagaagttaactgggcaaaaacgcatgatgagcgaggcgctgattcgtatgtggaacaagtttagggaatacctcaaaccccagatttgggtcaagaaagaaatgccttacacaactcggcgcgttgaaattgatgagacgacattttacttagcacgcgcgagtcaaaatgatattacggcattgttggacattgaacggtcggtctatgccggtcagacgccgtgggatcgttggaccttcactagtgagttgagcaagcgcaagacatcgttgtatctggttttatgccaagggactgaagtcgtagcgtttgtcggtgcatggttttcaaccaatgaagctcatattacgaatatcgcggtgcggccaagttatcaaaaacgtggtattggccactttttggtgcacgaaatggttagtttagcccacgattatcccagtcaaaaaattacactagaagtacgcgccagcaacacaagcgctcaagccgtttatcagcgattgggttttacagtggtgcggacgcgtcccaattattacattcaggaaaaagaagatgcattcagtatgtgtcggatattgagtcaataggagtcagtcatgtcggaaaaacgagaattaattttagcatttgaatccagttgtgatgaaacgagtgtggccgtcatcgaagacggtcatgttattttaagcaacatcattgctacccaaattaagagtcatcaacgttttggtggggtggtacccgaagtggccagtcgccatcacgttgaacaaatcacagtttgtacacaagcggctttagaagaggccggggttacttacgctgatttaacggcggtcgcagtcacttatgggcctggattagtcggcgccttattaattggcgtgacagctgccaaagcgattgcttacgcacaacacttaccattgattccagtcaatcatatggcggggcatatttatgcggcgcggtttgttaagcctttagaatacccattgttagctttactggtttcaggtggccatactgaattggtgtacatgccagccgccggcgaattcgaaattatcggtgatacacgggatgacgcagcaggtgaagcctacgataaaattggtcgcgtcctcgggattcaatacccagctggtaaagaaatcgatcggcttgcccacttaggtcaagatacatttaaattcccgcgtgcgatgctcaaggaagataatcttgacttcagctttagtggtttgaagagtgccttcattaacacagtgcacaatgccgatcaaatcggtgagacgctgaaccacgaagacttagccgctagtttccaagcgagtgtggtcgaagtgctcaccactaaaacgatgcacgccgcgcgtcaattaaacgtgcgccaactcgttgtggccggtggggtggctgccaatcaaggtttacgtgaaggtttggcgacagccattaaggcatccggaatggatttagacctcatcatgccaccacttcgattatgcggcgataacggcgcaatgatcggggccgcagcgcatatcgaattacaaaaacaacaatttgctgatctaagtttaaatgcagtccctggtttggattttccatacggtgcataaaatacgaattcaaaaagcctgtcgataatttcgacaggcttttttgcttaaatggattgcttagttgattgtaaggtagtatagatgtccgtcggcagtgccactatcaacggactgagctgatccacgccaatcagtgttaaatcgtgcatagcacgtgtgacgagtgtgtagaggagatctacgtctgattgtgcgccgaaggtcttcttagagatgtcgtagccaatcacagcgtcgaactcgagccctttggctaaatataatggaaggattaggatgcctttgggtaaactacgggttgtttcaccgatgagtgtgacgtgttcatcaggtgttaaactagcgtagagttggtgggcaacttgttggttcttggtgaggatcgcaacggtcgcgtgttctgcctggagatggcggatttcttgggtcagtgtagcgagcgcttggtcgtttggcgtctcaatgacgcgcggtaggcgcccgtcacggctgaaggcttggagggctgtttcttttggcaagagtgccttggcgaagttggtgattggggcggtcgcgcggtaactcttggttaagctaatttggttgatttttaagcggggaaaagcagcggtcagttgatcgatgaagtggccggtttggtaggtcgccgtgaagacatcctgtgcgtaatcgccgagcacggttaatttcgcgttgggaaaggcgtggtggatgtagacgaactgagcgatgctgtaatcctgcatttcatcgatgaagaggtactgaatgccgtgattttggccgctgtcagttaataagtcgcgcaggtatagaattggggcggcgtcactgagcccgacgatgtggcgttcattgttatccgcgacttggcgaatcatggcgtcccaaaccttcgtagggatgtcggcagggcaagcaccacttaagaagtgttgatattctgtggattcatctaggaaataatcattgtagattgattcatagagtggggcgaaataactttgaacgatttcacgagcgatgaaagcttgttcatcatcgccagaatcgaattcgcggtcaccgacaatcgtccggtaagcatcatcggttaaggtatcgattttttcagcgacccagtcgagatgaacttcgaggttgatttggcgtttaagccgtttgatgagcgtgtttttagtggcgaggaatttgtcgccgggtaacatatttgcggggagcgcgagataaatctgattcatctggtctttagtaaaaaatgggcggtcttcgaagtatagatcgttgaatgccaacggttgggttgaggcttgtttaacgtaagcttcaattgcgtgcatgaacgctgcgctttctttataccggcgcatggcttgtgtcatttcaggaaaactggcttgatctttttcgaagcggtcgaagaggttctcaacctgtaagcctgagaagcgatgacttaagaactcggccatcgtcacttggcgcatgtttttctcgcctaaactaggcaggacttctgaaatataatggctgaataaacggttgggtgagaagagcaccatttggtcggcttcgagctgactgcggctgtgatagagtaaaaaggcgatgcgttgcaagacagctgaggttttaccactaccggcgaccccttggacaatcagtaagtcagcggttgtatcgcgaatgatatcattttgttctttttgaatcgtggcaacgatgttttgcatgtattcgtcactttgttcaccgaggacggcttgtaagagctcatcgccgacagtttcgttcgtatcaaagacgtgttcgatttgaccgttttgaatcttgaattggcgtttgagtttgaggtcaactttgacagggccatttggcgtctcataagtcactggaccgagtgtcccattatagtagatactcgaaacaggggcgcgccagtcgtagattaagaaattgtcttggtcgtcgataaaagtggcggtcccgatgtagagtgattccgtttcaccatcttcggtgatgtcaatccgaccgaagtaaggggagttgacgagatcggtcaggcgttcttgttggctagtcagtaatttttcgttttcgacagcggcggcgaccaattgcttttgttgttggaccgcggcgttggtttccatgcggtcatcgacttcggtaatgttgactttcgtattgtcgccgtaacgttgttcgatgtctttggtttcattgtaggcgttggccaattgttggttaatcactgtgaggcgttggtcgacctgtataactgtgcggtcaacgcgcgcttgttcttgttgttttgtgtcttcgtgtaacatagcagcctccaattgttagttgttatattataagcgtcttggggtaaaaaagcgaccgattgacattcattttaaaatccgttagtatgacagtaattcaacagacaaagtgaaggataagtagcaactgatattttcttgaacaggaagcgacgggactgagaagtcgtcaagaatttggttgtgaattgggccttcaatcgggaattagtgagtaactaattcgggtagcacccttatcgcgtgagtggcacggatgattttcgtgcaatttaggtggtaccacgtagaagcgtcctaattgtttaatcacaattagggcgctttttttgagttgataaattaaattggagggtattattatgaacaaaaaaattatcttaaccggcgatcgaccaaccggtaaattacacattgggcattacattggttcattacgcaaccgggtagcgatgcaagattcaggcgaatacgaaacatttatcatgattgccgatcaacaagctttaaccgataatgcgcgtgatcctgaaaaaatccggaacagtctcttccaagtggctttggattatttatcagttgggattgatcccgctaaaacaaccgtcttcgtgcaatcacaaattcctgctttgagtgaattaacgatgcattatttgaaccttgtgacggtttcgcgtttacaacgcaatccaaccgttaaagctgaaatccaacaaaagaattttgaacaaagtattccagcgggctttttaatttatccagtcagccaagctgctgatatcacggcgttcaaagcaacgacagttcctgttggtgatgatcaagaaccaatgttggaacaaacccgtgaaatcgtacggacgtttaacaacgtttacggacaagaaattttagttgaaccagaaggggtcttcccaccaaaaggcgaaggacgcctacctggtttagatgggaacgccaagatgagtaagtcattaggcaatgcgatttacctatcagacgatgcccaaacgcttgaaaagaaagtgatgtcaatgtacactgatccattgcatatcaaagtaaccgatcctggtcacattgaaggcaacacagtctttacctatttagatgccttcgatgatgatcgtgaaaaagtggctgaactcaaagcgcaatatcaagctggtggtttgggtgatgtgaagatcaaacgttacttgaacgaagtcttacaagcgaagttcgcacccattcgtgaacgtcgtgctgaatttgaaaagaatccagaagccgtttataagatgttagaagaaggtagcaagaaggccaatgctgttgcagaacaaacccttaaagaagtgcgggatgcaatggggattaattactttaactaatcctattcaaattaaaaaaacagttaaacaagtcgctgaatgacttgtttaactgtttttttatagactaatatagtgggataatagatgctttttgatggtactttaaagttgaatatgagagacttaattcaatttaagacagatgtaaacgctgtttttggtgtataatttgagaagttatcaacatggagcaaaggagaattgatatgcatgatttaactaaaggtaatccgttgaaattaattatcttatttaccggcccattattgattgggaatatttttcagcaactctatagtgtcatcgataccttaatcgttgggcggacaattggtgttaatgcgttagcagcagttggctcaacgggtggattgaacatgctgattatcggtttttgtacagggaccacggctgggttgtccatcttgacagcccaacgctatggtgctcaagactatcgcggcgttaagcgcagctttgcgacgagcattctgattagtttggtgataaccatcattttgacagttattagtctattatttgctcgacatattttggtcatgatgaagacgccggccagcatcattgttgatgctcaacggtttattatgattatctttggtgggatttttgcctcgatggcgtttaacttactttcgaatatcattcgcgcacttggggatagtcgaacccccctctttttcttagtaattggggtcattgtgaatattgtgttagattttatttttattttaggctttcatatgggcgttgaaggggccgggtttgcgacggtctctgcacaaataattgcggctgtgttatgcttactatatatttatcgccgcattccggtcctcgttttacggccgaaggattttcgcgtgacgcgcaaagatgtcatggatcatctcaaggttggattaccgatgggctttcaatcgtcaattattgcaattggctcaatcgtgatccaaatcatgttgaatacattgggtgctagcgcggttgctgcttacacagcggctgggaagattgatcaattagcaactcaagttgggaattcatttgggattaccttggcgacatattccgcacaaaattacggtgcacgtgaatttggacgaatcagtaaaggggtccgccagacactaatggtgtcaatcatctttagtttagtgatgggcgcgttgatcattgcctttggacgaccactggttaacctgtttatcgggaacaatcaaccgcacgtgacggatttagcacaaatctacttccgctttaacagtagttgttactttattttggcaatcttatttgccattcgctacaccttgcaaggtttggggcagagctttattccaaccttagcggggattgcggagttgttcatgcggatttttgccgggatcttcctcgtgcagcaattcggcttcatgggcgcaagtttagccaacccactcgcttggattggttcatgtttggtgctattgagttcctatttcaagacaatgcaccaactgaagcgtcgtgaagcaggtaagaatagggaggaacaggatgtttaaaaagtatttattggtcggcttatcgttgaccatgttggcgttgggtggctgtcaggcgacacaatctagtcaaccaacgcacgagaatgcaccaacaattgcaaataaaaaacaagttaaaaaaacaacggcaatcttggctgagaagacctttaagtcaggcgacaatgcctatttagaagtgaaccataataaatcaacgttggatgtccgtcaatggcaaaccgaacggatcaagtatggtgcgttggatggtttaaatcggacaacgactaatacggctttcttatcgaaagagacgttaggccgttcaaacacacgccatcgtcaaacgtggcaaccaaccggctggcataatcaacccgtgatgattgatggccaacgggtctttcctgaaagtcgcggccatttgattgcatacgcgatttcgtttaatttcaaccgagatggtgttttccaaaaaggggaactcggcagtagcaataatccgaagaacttagcgacacaaacggtcttcagcaatcaacgtaccatgcagatttttgaagaccaggttcgccaagcactaacgcaaaataaaaaggtgatttaccaagtgacaactgtgttccgtggagatgaattgatgccccgcggttactgggttcaagcaatctcaacagataagaagttgaactttaatgcgtatgtttggaatgtacaacctaagatgcaatttgactatgcaaccggtcgcggccattacgatggatcgatggcggtggtggatcagtatgcaggcaatccttatcagaattaagtagaaccaaaaaaagcgccgtctcaagattaattgagacggcgctttttttgcttaatgcacaattactacttacttagaaactaaccgttttaaacgtactttaaacatgcttcgatagccataaccttccggttcactacacaacaaaaatcatggccggaaaccaccataattcctggtgataggctaatcttcaagtgataaacggctatctcagcactttatggcaggtcattgcctgctgccaagtataggtcgtaccattctcttctggtgagggtgactttgtctgcttcgcagatttgtgctaggcggccggggttcattgtgccgacaacgacttgcatgctggctggaattctgaggagccatgcgctagcaattgcgttgacgttggtgtcatgtgccttggcaactgattggagtgctgcgtttaattctggaaatttcggattatcgatgaagaccccttcaaacatgccgtattgataaggactccatgcttgaatggtcatattcgtgaggcgtgagtattctaataaaccaccatcgtgatgaatgctgcgcgcgtcttgcatattggtatgcacgccggcatcaatcataccagtgtgcatcaaactgaattggagttgattagcaatcaatgcttgcggcactgcttgttggagtaagtcgacttgaccgggattgaagttgctgaccccgaattggcggactttaccactattttgcaattttaagaaggcttcagcgatttcatccggttccatgagtggatcaggtcggtggagcagtaaggtgtcaacatgatcaagttgtaatcggttgaggctggcttcaacaccttcgatgatgtgttcctttgaaaagtcgtacatttttttgccaatgccgactttggtttgaacgagcacttgatcacggtcaatatgactggccttaagggcgttcccgaatttaatttcggaagcaccatcgccgtaaatatcagcgttatcaaagtaattaatcccatgttcataggcggtttcgagcattgtcagggcttcttggtcgctcagttgtgggatgcgcatgacaccccagacaattggcgaagccattaagccgctgccaccaacattgattttttgcactatcaatcactccttttatttgatgcttttaacctaccacaaagtaccattaatgaaaagaaaaggctttcctgaatttcaggtcgtcactggcgacaattttcggtatactaatcacaatagacaggagacagttagatgacagataagaaagcacaggcaccgcggctaaatccacaacttgagacggtacagcttactgcgtttgaaccagatgagacttatgaaggtttgtttttcgaagaactaacgttgaagcaaaccgaagttgagatgttattctttaaaggctgtttatttaaaaattgtcagtttgaacaagtcgactttaataactgtgattttcaagatgtgcaattcgaacactgcgcgttgttaaactgttcgttgacgaatgatcccttccaacgagtcgcgtttaatggttgccagttgattggttccgattttgcagaggctggtctgaatgatgtcacgttcgacacttgccaagcggattacaccggctttaactttgcgcggatgcggcatgtcgactttaaagattgcagtatgcaagaagtctcactcgggcaagttgattggcagtggctaacaatggtcgggaatcgtttgaacggcatggatatgactggcacgaatttgaagaatctcgatatcagtcagaatcaattcgaaaaagcgactttcacgctcgaattattacgtggggcgaccatcagcacagaacagacgctcgtgattatgagcgcgttgcgaattaacgtccgctagcttgccggtttttaaaggcaattatcagacaactgattgttgcgatgagcatcacaagcacagcgaagaaatcttggtgcaacagctggcagaggccgctgatacataaagcgatgaataaaataagtgggattttaaggttggctttcattggtcattcccccgtactttaatctgaaaaggcagcgacaaaatattgtggctgccttttcgtttgatttttaataattaatcttgtatgtcaattcaacaaaatgaccgatttgacggctattgataagttccaatggcatatcggttaagtgcgtgctgaccagtgaaatgccgtcacccaggagaactggcgcaatggtgatgatgagttcatcgactaactgggctttaagcaattcggtaaagatttctgcaccacccacaagccagatattgccgccatcttctttttttaattgacgcatgaactcaggaatattcccagcaacgacatgtgttcgatcttctgtatcatgtaacgttttcgagaagacatagccgtttttatcttggtaaggataggtgccggctaatttaagactttgttcatatgtcttacgccccatcacaacggtatcgacggtgcgttggaaagcttgaattgcagcgtctgattcggatgaatcgagtgcagctaaccaagcagtactaccatctttttcagcgatgaagccatctagactctgagcaaggtataaaattacttttcgcgaatttggttctgtcatagtcaacacgtcctttaaattaagattacctttattataacagttttaaccgctttcatacattctaaaccgttggtaatttaactggatttggcttatcatgaaaagcaaagctgtttactcaaaggagaccaaaaatgacaactactgaattttctccagaaatccaaagtttaattgaccaagttcaaaagaattatcctcaacccattaagatccgggtcgcagacgcagcgtctgggatgttaaaacatgatcaggcacaacgcgttttaaataacgatggcagcttggcaatcttaattaccgatgcgacagcggccgattatgctttatcacatgaattattacacttactgttattatcaatcggttttccacaaatcatgaccgatgtcaccacgcaggatgcgcaactcgatgaacaattggttgcgaccggcacaacgttgtacaatgctgctgtgcatatggtgattcaaaaagaacaagaatcccatggctttgtggatgttgaaactaaacaagcctaccttgaaggtctacgagataatctgaccccggaaaaagacgatcccgaaaatagatgggtgattttccgcgtattaacgctgttagatgccctcgtcttctttgatggtggcaaccaacaactgttaaaacagtggacggctgattatccaattgcgtttgcccaagccgaaattctctatcatgtgttggtacgcaaaacaattgattcaccattcacgttacggcgggctgtgattaacttgtgggttgcgtttgatcgcgtgttatcaaccctaggatttgctgaaacgaacctccaacaactcttgacattgacgccggtattaagtgaacggcaactacgattagaagtgcgccaagtctacgatattttacattccgaaaatctatttgcgaccgcaacgaaccaaaaagcgtatgttggaattggtaagagtgatcaacaaaatgcttttgtcttagggattccagaagacaaggcaacaccggaatatttcaaacgattgtatgatttatcagtgcaaaccttcttagatgaaattggaatgccgtattcattaagaaaatgagtgcgttcaagctggtcaacttttgagcattagcacagggaagcgaattagcgacgcagtcgatgatttgattcacagtgctaagcacagaaagttagcttgaaaagcacgttaaagaacagagtgcgttaattcgcggttagcttttgagcacttgcctaatcagacggataagcgccaaaggcgattggccgactgatgtagcaaagcgcagaaagctgcgaattaaaagcacgttaaaaaggagtgatggtgatgacttttaaatcaatgttgcatgcggcacagcatgttgttttcttgacgggtgcgggcgtgtcaacggcttctggcattccagattatcgatcgaaaacggggttgtatcatcagcaagccaatccagaatatttattaagtcacacgaatttaatcaccaatccagccagtttttatgaatttgtcacgcagcagatgtattttcctgaagcaaacccaaatgtcattcaccaagtgatggcgacgattgcgaatcaaaaggggcagattatcacccaaaatgttgatgggttgcacacaaaagcaggcgcgcgggatgtgattgaatttcatggtagtttataccgtgtcagctgccaaaagtgtggccaagcagtgccttatcaggcctatttaaaggatatgcatcatcaagattgtggtgggattttgcgaccaaatatcgttttatatgaagaaccgattgatccgacggtgattgaacggtcgattcaggcgattgaagcggcggatttaattgtcgtggtcgggacgtcatttcgtgtgtacccatttgcaagtttaattgaatatcgccgtccagatgcccaattagtagcgattaatcaagaggcattacaatttgaaatgccagtcactatgatacaagcggatgcgacaaccgtttttgccgcactagcaactaaggagtgagcccatgttaactgaacactatcaaaaaattgatgcaattgatgcccaattggcggttttatttgaagaacgcatgcaagtcaccaagcaaattgcgacaatcaagcatgaacaaaaaatcggcttgacggacatccaacgcgaaaaagcggtgatggatgcgcgccttgctgcggttaaagatccagcactcgcagattacgtaagggatttataccaaacgttaattttaatttcgaaacaatatcaagtaaaattgatgaaggcgatgaaagaagcagaagaaaaataatgtggaaagagcgaaacggagacggagcgctcttttttgatggaaacgtgccgattcgaactgccttttccggttaacctaaaaatggcaatcatggctgaagagcgccataatccccatttttttgttaatcctcaaagccaacccgttcgactcagacactctaaacgtgccgagtctgctatatctttccggttagctacgtatcgcaaacgatcgacttcgtcgctcattcacgatgcgctgctaatcctcaagatataaccggcagattcagcactctgatttgaaacgtgccgattcgaactgccttttccggttaacctaaaaagggaaatcatggctgaagggcgccataatccctattttttgttaatcctcaaagccaacccgtttgactcagacactctaaacgtgcttcctgtcgcagtaatttccgcttaatctaaaaatggtattaatcctaaacccctggattaataccatttttgaattaatgctcaattgctaaccgcgacagtcagcactcttttgcttaatatgctaaaatgaaactaatttatgagatgtgaggctattgaactgtgactaaacgacgctataatttagcggtaattcgctatcgcgggactttactattattgaatcggattaagcccccatttgctgggctttggaatggcattggtggcaaaacagaacccgatgagacgccaatcagtggtatgcaacgggagttatttgaagaaacgggtttacaaaccaaccaatacacactccaaaatgcggggtggattgattggcacatcgacggtgaaacgattgcaccgattgacatttttttagtcgatattttaccaacggtgcaactaccactttatccggtcggaatgcgcgaaggcgtgcttcaattatttgaaccagaatgggcacaagctgctgataatcaaggaattgtggcagacttacaggccattttaccaactgttttaagcggtcagctcaatcggtatgacacggattttcatgcagatcagatgattttctttgaagcaattcccattactgaaccaagagaaggagaggaagcactatgatgacaaaggaccaaacgatgatggtcttgatggttttaaagaagaagttgcaagggattcgtttttttagagtcgtcgaagaactgttctcgttatacattatttttaaattcttaactgcaacgggccaggtacagcttttaggggtggcgttttctgaggggcgcgccattagcttaatgttactgctgctagtcatcgactttagcctatcgcggattcggttaaattataaacgcatgggacaacaattaattgtcacattgaaggatttaacggaacaagaagctttgttcattcaacaattccaacggttctagaggtgtggatatgataacaattggattaactacttggtcagaacatcagtcattaatgcccagcaaaaagcagttaacattaaacgactacgcgcaatttctgccagtggtggaggtcgatagtttttattacggcttacgcgcaccaaccgtcagcgcgaactggttgacgcaagtaccagccagttttcagttcattgttaaagcacaccaagcaatgacccgccaagaagactacgccgagtttacgagtactgaaaaagaattgtttgtgcggtatcgccaatcaattgaaccgctaattaaggccggccaattacaggcggtcttatttcagtttccgccattttttcaactgaatcaggaaaatagtcaatatttacgacaaattcgcgcgtggttaccggatgtgccaattgctgtcgaattccggcatcaatcctggtacgatgacgcttttaagcaacagatgtacgcctttttgaagcagctaaacatgacacacgtcatcacagacgaagcacaaacaccgacgaacagtgtgccgtttgaaccggttgtcaccaatccggcgtttgcgatgttgcgcctgcatggtcgtaatatggccgggtggcagaatccgggtgcccaatggcggaagcaacgaacattgtatcgctatgatcaagatgaattacaattttttgcggatgctgtgcggcagattaaaaatcaagcggaacaagttgccgtgatttttaacaataattctggtggggatgctgcggataatgctttgcaattacaacaattacttgggctagaatttcctgatttagccccgaaagcgcctgaacagattgatttattttaatgaaggcttagtgtgagttgtcgtttaaatgactgctcttttgtgctatactttgattacttatatggcattatttaagcaagtcgagaattgttaagattctcgtttttttaattaaggagcgaacctaatggcagagacaaaaccaacattttacgtaacgaccccaatctattatccatctggtaaattaacgattggtaactcatatacaacaatcgccgccgatgtcatcgcgcgttataaacgcttgatgggctttgatgtcttcttcttgacggggacggacgaacacggcttgaaactcgaacaaaaagcagctgaaaagcatttagccccacaagaatatgttgatggcatggctaaagacatcaaggcattatggcaaactcttgaaatttcaaatgacaaatttattcggacaacggatgaataccatgtcaaagcggttcaaaaaatcttcgacaagttattagcgcaaggcgatatctatcttggtaaatacgaaggttggtattctgtttctgatgaagaatacttcactgaatcacaattagcagaagtttataaagacgacgatggcaatgtgatcggtgggaaagccccatctggtcatgaagttcaacgggtcgctgaagaaacttacaagtttaagatgagcaagtatgctgatcgcttattggcttattatgaagaacacccagatttcatcgaaccggcgtcacggcgtaatgaaatgatcaataacttcatcaaacctggtttggaagacttatcggtttctcgaatctcatttgactggggaattcacgtttcaagtaatccgaagcacgtggtttacgtgtggttagatgcgttatcaaactatatcacagcgcttgggtacggttcagacaacgacgaattgtttaataaatactggcctgctgatgtgcatctagttgggaaagaaatcgtacgattccatacgatttattggccaatcttcttgatggctctagacttgccattaccaaaacaaatttttggtcatggttggttgttgatgaaagacggtaaaatgtctaaatcaaaaggcaacgtagtttatcctgaaatgttagtggaacgttatggtctagatgctttacgttactatttaatgcgcgcgattccatttggtaatgatgggacatttacaccggaagactttgtcagccggattaactacgatcttgccaacgatttaggcaacttattgaaccggaccgttgcaatgattaacaagtatgataatggggcagtgccagcgtatcaagctgacgtgacaccatttgatgcagacttacaaaagacagctacagaaacaatcgaacaatataccagcttaatggatcaattgaagttctctgatgccttagataccgtttggcaattaatcagccgggcgaataagtacatcgatgaaacagaaccatgggtcttggcaaaagatgacagccgcaaagcggaactcgatagtgtcttagcccacttggctgagagtttacggattgttgcgctcttattacaacctgtgatgacgcatgcaccacgcgatatgtttgcacaattagggcttgatttcgatcaagttgcgcaacgtgaattggtttatgggacattcccagccaatattcaagtggttgctaaagggaccccaatcttcccacgtttagacttggatgaagaagtcgcatatattaaggatcaaatgggtcaagcgcaaaaagcgggcttagtgaacgaaaaagtgaaggctaagcaacaagcagctgaagccaaagctgaattcgatccaaaagcaacaacattagtcagtgaaaaggacgccatcaagtttgaagagttcgatcaaaccgaaattcgcgttgctgaaattaaggcagttgccaaggttgaaggcgctgataaactattgaaattccgtctagatgctggggatcaaggtgatcgccaaatcgtttccggcattgctgaattctatccagactatgaagcattagtcggtaagaaagtcttagccgtcacgaacttgaaaccacgtaaattgcgtggcgaattgagccaagggatgttgttatcagcagaacatgacggacaagttgaattagcagttgtgccaaacaacttggtgaacggctcacaaatcggttaatttaaaataacagaaacgtcaaaagggctaaaaggcatttacattctgtaggccttttagcctttttaatggaaaagagtgtgttgccagtggttagcttttgagcatttgtctaacttggcgaattggcgatggaatcgccggtttgaaagtgtaacaaagcgcagaaagctactggcaagagcacgttttaactgtcagaatgaggacactaaaaggagattgaaatgcaaatttttgattcacatacgcatttgaatgataccccatatgcagggcaagaagctgattttatcgcgcaagccgctgaactcggtgttgttgaaatggcgattgttggttcagatacagtattaaatgagggcgctttgcgcttagcagcgcaatatgaacctttatcagccattatcggttggcaccctgaatcagccaaagattatcacaaggcagaagaaaccgtgctgattgaccaattacaacgaccagaagtagtggcgctaggtgaaattggtttggattatcattgggatacttcgccacgcgatgtgcaacaaaccgtttttgcacggcaaatcgagattgctaaatccttgcatataccaatttcagtgcacacgcgggacgcgttagaagatacgtacaagattctaaaagaaacagatgtccgtgattgtggggggattatccacagttttaatggtgatgttgaatggatgaaacggtttatggatcttggcatgcagatttcgttcagcggtgtggtcagttttaaaaatgcgcatgaagtccatgaagcagctaaagcatgtccattggacgtgatgttggttgaaacggacgcaccttatttaacgccgacgccttatcgtggtaagcagaatcaaccaggctacacacggtatgtggtagaagcgattgctaaactcaaagatgtggcaccagaagaaattgcggcagcgacgtatgcgaatgcccaccggatttttaagttaggagcactatgaaaaaaacaattcaagaagtgattgttgttgaagggcgcgacgatacgaagcggttacgggaagttttcccagatgtttcgacaatcgaaacgcgcggttcagcaatcaatgaagaaattatcgaaaaaattgcgctcgctcaagaaaaacgcggggtcattgtctttaccgatcccgattttcatggcgagaagattcgtaaaatcatctctcaaaatgtaccgggcgtcgaacacgcctttttaccacggacagaagcacgtccggaaaaagcaggcggcagtttaggcattgaacacgcaaaaccagcggcgattgtccaagcacttgagcatctattaacacaagatgaagaagcagacgaacaaatcagtcaatcggatttattaacggcgggcttgattgcgggggctgattcaaagcgacggcgcgaattactcggcgaaattttgcacattggttacaccaacagcaaacaactttacaagcgtctcaagatgttccaagtgacgcaagctgaatttggcgctgtactattacaaattaaacaggaattaggagattaatatggaagatattgcaaatcccgagcgtacccggaaaattctcaaacgttacggctttaagtttaaaaagagcttaggccaaaacttcttaaccaacatcgccattttgaaacaaattgttgaagctggtgatatcaccaaagatgacgatgtgattgaaatcggccccgggatcggttctttaacggaacaaattgccagaaaagcgcatcaagtattaagttttgaaattgatgaacggttaatgccggtcttaaaagatactttgaatcactaccataacgtcacgattttaaaccaagatattcttgaagcggatttaaaaacgattatcgccgaacaatttgatggtaagcataatctcaaaatcgttgcgaacttaccctactacatcacaacgccgattatgctgcacttactagaagcaggcttgccaattgatcgcatggtcttaatgatgcaaaaggaagtggcagaacgaatcaacgctgaaccaggttcaaaggcttacggctcattaagtatcgccgttcaacttcattcagaagtgaacttagcctttattgtgcccaagacagcctttatgccacaaccgaatgttgattcagcgattgttgaattagtggggcgcaaagcaccacttgtaacggttgataatcaaaccttatttgatcaattggttcgtggcgcatttgcacaacgccgaaagacattatggaataacttgcaaaatcaatttggtaaacaagatgaagtcaaagcagctttaacaacagccttagaagcagtcgagattgcaccgagcgctcgtgctgaacaattgagtatccaacaatttgcccaattaagcgatgcgctgaataatcagccaatttttgctaaaaaagctaagtaagtaattgccaaatcgttggtacaatggtataattgcaaatttttcgtttatatggtatactatccctcgaagaggtgaagcataatgccaaccacacttgccaatattaagaacggtctcgatgggcatatcggagacaagttaatggttgtcgctcaagctgggcgcaaaaaagttacaaagcgaaagggaattcttaaagaaacctttccagcagtatttgtagtcgatttagatcaggatgaaaatgcttttgaacgtgtttcatacagctatgctgatttgttaacgaaatcgattgagattgagtttgatgaagaaccaattgtcctatagtttaaaatagaagaatagagtagcactcaaccaacgggttgagtgcttttttttgttcaaaaggcagattgacgaatcgccatatacttcacgtggttgattagatgttgacattcgtttgataaaacaatatcatatagaatgtttatgacgtatacaaaagggagaaagaatatgtttggcaattggagagagaataaagtgaagttaggtgggttcattattatgatctgcttaattccgattttactattactaatcacatttaattttattaagtacgaacagaccactaatattaaacatatgaaagtcgcggttgtgaatcaagatcaatccgcaacatttaaagggaaaaaggtggcagttgggcaacaggtactaaaaacgttgcgcaatgatcaccgggtcgattggcaatttgtcagtgctaaggatgcaaaagcgaacttagctagcggtcgatacgcgatgcaggttgtcttaccgaaagacttttctaaaaatgcgacaaccgcgttagataagtcacctaaagtcagcttgttaaaagttgaaacgtctaagaaaaataactacatggccggcatgattacaacccaagtcgtgaaccaaatgaagggcagtgtcgttcaaaaaattcaagaagcttataatcaagccttgcttggtgcaatcggcacgctaggcagtggcgtacaagaagctagcaatggcgttaaaaagttaaacacagcagccggtcaattatcaaatgggagccaacaaatctatgataatttaaatgtgttgcatagtgggacacaacaattggcagatggtagtgcgccattggcaagtggcgtgcaacaattaacaactggtgctgggcaactttcggctgggcttggagattatacagctggcgccggtcaaattaatgccggtttaaaccaactagcagccaataaccaaacaattttagctggtggccaacaaatcagtggcggtgtcgaccaattagctgatggcactaagcagttgagtgcaaaactaactgaagcagccgatggaattgaatccagtttagatggtaatcaagaccaattaacacaattgaaagctggtttaggcgctttaaatgctggtattcaagagttagatcaaaaagttaaccattccaataatgataattccgaaattatcaaagcagacttattaaagattgcggataatacaaaaaatacaggggcacttttacaggatagtggtgcgaatttaagtcagattaacgataaagtgtacaatactgctaaacctgatagtgttgcaaacagtttacaagatgcaggaaatcaactaaaagccttacaagatttagcggtaactaacggtaagtttgcaaagtttttaattcagaatccaactattttgaaagcgttgctggatattggagatgcagcaaaagcagacttgctgaatgctggcagtcagttagagtcttctggcacgaacatgaaggctattcaagccaacttaggcacgatgggcagcaacatgagtgatactggtgttcaactacaggctgtttcagatgaattaacaaaaacggctgataacatggcacaactaaaagccggaatcgcgaagatggcaagccaagaccaagcgccgttagcactaaatggtgctactcaggcgattgatacactgacagcggggttagccaaagtcgacactgggttgaaacaaaaaggaaatacgaccgatacaatgggcggaattcaagctgctgacatgattcatgccggcttggttcagattcaagatggtctaaaagggaaagctggtcaacttggtttaatgtcaggcttaacgacttatctgaatggtgtttcgactgcagctgcggggagcaatcaattagtcgcgaataacaacaagcttaatgccggcggacaacagctaacaaatggtctacaagaattaaaccaaaaagcaccaacgcttgtttctggcattacacaaattaacgagggttcaggcttattggcagatggtgctggacaattaacgactggcttaggccaagcgggtgctgggattagcttattaaacgtcaagttaatcgatggtagcaagcaagttgccaatctttcaacaggttccgcaaatgtagaacatttcgtgcaaccagtcaaagatcaattactatcagatacaaatcatggcgcattaattaataccttctcgccattagtcttaacacttgtcttctttgttggggcaatgttgacgcaattaacactttatcgctatggtgaaacattggcacatagcggtcttaagcaacggatgttggttgtagctggcgtagttgtcgcacaagccttattaattgatatctttgcaaacctttttggattgacgattgcacaaccgttcgcattcttcgtcttaagtatgatgacgagtgcggtctttacccttgcatgtttagcattggataaactttttggaacgatgggaattttaatggccttcgggttattgttcttacaactcatcattacagggggactcttcccgaatgacatgctttcaggcttctatcgtggtgtggcaatcttcttgccagggacttacacgattagtgggttcgaacaagttgtcaacggcaatggttcacaactttggttagtcttaatcgtcttggtgatcttttgtgcagtgttcttcgccggtttgttcggcggagagttaaaacaaaagttaacgcaaacaccaaatagtcaagcttaaagatttgtggtacagttaagaaaataaataaaaaggtgggaaatattgtgaaagatagtcaattgttggatgaatacgttgaactttacatgtcggcgattaaatatgtcgaagacttggtttctgaaccaacgcaagcttaccaattgtcttttgaacaatatctgattatgaaagagattgctgatgataattcagtgagtctaattgatattgctaaaaaacgaggcgtaacacgcggtgcaatttctcgacagattcgtgttttacttaaattagactatattacacaagaaattgatcccgatgatcggcgccggttgattttaaatttaacgccgtctggtcaaaaaacagttgaagaattaaatccgaagatccataatcggtttgcctcgtggatggagacgtttggtaaggaaaatgccaagcagatgcttgatttaatgaatgaatttagacataagattatggtaaaagataatcaataatatcgactgaagagcactgacagatgattgtcagtgcttttttggatgcattgttaaaaggttggtttttacaagcagatatgagtataatgaaacaattaaatgctaggtaaaaggtgaatgtgatgcaacgaattgaaaaagcacctgctaaaatcaatctcagtttagatgcactctttctacatgacgatggggaacccgagtggcagatggtgatgacgtcgattgatttggcagactatgttcagataacattacgcgatgatcccgcaattgaggtccgcacatcaagtggctttttgccagaagaccagcgtaacctggcctacaaagcagctcaattattacaacacacctatcagattccaaccggtgctttaattgaaattgataagcatattccagttgcggctggcttaggcggcggaagttctgatgcagccgctgttttacgggggttaaacgaactatggcaacttggtttaacgcgcgaacaattggcgcgattagggctacaaattgattcggatgtgccatattgcgtatatggagaaaccgcccttgtcactggcaaaggcgatcagatcaaaccactcggatcattaccgaatttttgggtcgttgtcgtgaaaccggaagtcagtgtttcgacgccgcggattattcgtgcattggattgcgaccagattcaacagcatccacaaactgaggcgctggttgcagccgttgaagctggagatttaaatgcaatgactcgcaatatggggaatgttttagcaccgattacgactgaacgttatccagttatcaagcaattaagtgagcggttattgcagtttggtgcggatgttgctcagatgagtggtagtggtccaacggtatttggtatctgtagtcagtattcacgggctcaacggatttataatagtatgtccggattttgcgctgaggtatatctggttaaaccattgaaaccataataaaacgccgacaatcaaatggttgaggcgtttttaattggcgtaggaatcgctttaatgggataaaagcgaacaattaagctctttttttaaaaaagactaggatttaaccgaagatttctatataattgattggtagacagtttttttcggaaataacagtaaagtaatatatagaggggtattcaacatgaaagttagaagaagcgatcgattaatcgatatgacacgctatttattagaaagaccacatacgttgattccattgacattcttttcaaaccgttacgaatcagctaagtcatcaatcagtgaagatttatcaattgtgaagcggaccttttttaatcctggcacagggatcttagaaacggttccgggcgctgctggtggtgtgcgctacatgccaatgattaaacaagatgaagcagaagcttttatcgctgagatggcacaacggctttcagaaaatgatcgcttattacctggtggttacgtctatttatcagacttacttggacgtccagaagtattacggcaagttgggcgtttaatcgccaaccaatatgtgggtaaagaagtgacggctgttatgaccgttgcaacaaagggaattccaatcgcacagagcgttgcgatgtacttaaatgtgccatttgtaattgtgcgccgtgattcaaaaattactgaaggttcaacggtcagtgtgaactatgtttctggttcatcagctcgcatcgaaaagatggaactttcaaagcgcagcttacctgaaaattccaaagtcttaattgtcgatgatttcatgaaaggcggcggcaccgtcaatgggatgaagagcttgattgaagagtttgattctgaaatggttggcatttctgtctttgctgaatcagatttcgaaggcaatcggatggttgatgattacacatcaatcttgaaggttgataaagttgatattgaaaataaaacgttaagtgtcagttatggtaattacttaacaaagaatgcagatcgcttagcttaaacgatttgatagcacccggacaggttaattgtgcgggtgctttttttatttgaagtgctttcggacagtttccaagctttgtccgttgcataaatgacagcggtaacatagactgaagttatatttaagaggaggttactatgaaaaaaataatgaatgatccaagccaaattgtaacggagatggtccaaggtttagtgcggagttatccagaccaactcaaacaaattccaggaacagaagcagtgatgaaaatcgccgatttaaaacatcggccacaagtcgggattgtcagtgggggcggtagtggtcatgaaccaacgcacgctggttttgtcggcgatggcatgttgacggccgctgtgtgcgggcaagtctttacatcaccaacacctgatcaaatttatgaagcaattaaagcagctgacgcgggccgtggtgtgttcttagtcattaagaattattcaggcgatgtgatgaattttgaaatggcgaaggatatggcggctatggatgatattgatgtccgctcaatcgttgttgatgacgacattgctgttgaaaatagtacgtatacgcaaggacgccgtggtgttgcggggacaatcttcgtccacaagattctgggtgcttatgcccgtcaaggtgctggtatcgaagcaattgaagaattagcgcaccaaattacaccgaatattaagacaatcggggttgccttatctggcgcaaccgttcctgaggtcggaaaaccggggtttgaattagcgcctgatgagattgaatatggtgtagggattcacggtgaaccaggttatcgccgtgaaaaattacaagattcgaaacacctagcaactgaactagtcggcaagttaaaagaagcccatcacatgacggccggcgaacattttgcggtaatggtaaatggcttaggtgcaacaccactgatggaacaatatgtctttatgaatgatgtcttggacctcttggccgctgaaaatgttgaagtcgacttcacaaaagtcggcaattatatgacctctttagatatggccggtgtgtcattaacaattatgaaattaattgaacctggttggattgctaaattagatgaaccagtcacaacgattggttggtaaaggagagataccatgttaacagttgaaaatacattgaaatggcttgaattgtttgatgcaaaaatccaagctgaaaaagattatctaagtgaacttgatacaccgattggtgatggtgatcatggtaataacatgtcgcggggcttgttagctgtgcatgaagcattgaccaagcaacagccaaccgatgtacaaggtattttgaaaacgactgcgatgatgctcatcagcaaagttggtggggcttctggtccactctatgggacagcctttttagaaatggcaaaactaagcagtacgacacttgaagtcggcccattattggcagccggtttagaaggaattcaaaaacgcgggcatgcacaagttggtgaaaagacgttgattgacgtttgggctcccgttgtcaaagcggttgaagatggtactttagatgtggctgcaattgaagctgccgtcgaatcgaccaaagatatgcaagcaaccaaaggtcgggcatcttatgtcggtgaacgctcaatcggacatgttgatccaggggcggcttctagtgggtatttatttactacaatgttaatggcgggggtattatcatgagtgaatatggtgttgtgattgtttctcacgtaccagaaattgcggccggtgtagcgcgtttaattaaagaagttgccgctgatgtttcagtaacgactgctggtggcacggacgaaggtggtattgggactagcgcaatgaagattcaaagtgcttttgaagccaatgccgggcaagaattgttagccttctacgacttagggagcgctaagatgaacctcgaattggcccaagaactaacggataaaacggtgcatctatacgatgttgctttaatcgaaggttgctatacggcagcggcattgttgcaagcagggacggatttagctgcaattgaagcccaattagcaccgttgaagattaaataagaagtaaaaactgcttaaaatgatgtctgttttggagactgagtttaagcagttttttatatagaataatattcaaaagaaaagatgatttttaataatgtaactagtaataactttaaaatattgttgaggacggtaatgtgattttaaaatacggtaagctatgtattaaatagatattgctgttatatttaaataaattaagaatgaatactatgattaacatattattaggaggattcaggttgaaaaatattattgttactggtggggccggctttatcggttctaacttcgtgcactatgtggtcaataaccacccagaagttcacgtgacggttttagataaattaacttacgctgggaaccgtgcgaacttggccggtttacccgcagaccgtgtggaattagttgttggtgatatctgtgacgctgaattagtcgataagttagttcaaaagacagacgcagtggtacactatgctgccgaaagtcacaatgataactctttgaaagatccttcaccttttattcaaacgaacatcatcggttcatatacgttgatcgaagcttgtcggaagtataatgtgcgttatcatcacgtttcaaccgatgaagtatacggtgatttaccattgcgtgaagacttaccaggacacggcgaaggcgttggtgaaaaattcacgcctgaaacgcgctataacccaagcagtccttactcatcatcaaaggcgagctcagacttgttagtgcgtgcttgggtccgttcattcggcttacaagctacaatctcaaactgctcaaacaactacggaccttaccaacacattgaaaaatttattcctcgtcaaattactaatattttaagtggtattcgaccaaaactctacggttcaggtcaaaatgtgcgtgattggattcatacgaatgatcattcaagtgccatttgggcaattttaaccaaaggcaaaatcggtgaaacttatttaatcggtgccgacggcgaacaaaataacaaagatgttttggaattaatcttagaattaatggggcaacccaaagatgcttacgatcaggtgaaagaccgtcctggtcatgacttgcgttacgcgattgattcaacaaaattacgggaagaattaggttggcaaccagaattcactgacttcaagtcaggcttacaacataccatcgactggtatcgtgacaatgaagactggtggcaagcagaaaaagcagctgtggaagccaactacgctaagaatggtcaataaatatgaaattaaattttgatgggattatcttataattaccgttgttcatataagtgtcctgtccgtaataataaaccgttaattgtatcagttaatgtcatttttagggcagtgattacttttgaaactgattggggatgacgactgcggagccattcagcggtgtaagcaactaatgcgttggaaagaaaactaagtaaaaaggcttggtagtcggtggataacgtaatgtgatgggcgctagcaagatcttgaataatccgattaatcagttgatggacgtgatgaataaaatggcgttcgaaggcgttttgcccttcaatcgacaaagcattttgatagaaggcgcggttagcatcgaagtagttaaatagttgcgccaacacctgtgtccaatgaatatagctgagatgctcgtcgatgtagacaccgatttcttgatcgtaaatccaatctaataacgcatatttatcagggaaataatcataaaaggtttggcgtcgaatgccagttttattcatgatggtggtgacgctaattttattaaaaggttgttcaaccattaattgtttaaaagccgtggcaatcgtttgttgggttgtctgagtcatcagggcatctccttttgaacgttattaagtaaaaagtcgtcattcaagctagtgaatgacgacttttgtattatatggaattgcggtatagaaccattgggcatcagctactgataaacggatacagccgtgtgaattagcttttttgcctaattgctctgcttcttctggaatgaaattgccagcttcatctgtgggcacactgtgaaaaagataaataccatgatctaggaaagagcgccagtatttggcaccttccccggaatttgcattgaaaaatgagtcgccgtgttcagcttcgatatagaaggtaccagttggtgtgggtgactcaggggaaccggtcgaagcatgcattgtgtacaaaagatcattgccatttttaaggtagacacgttgctgtgcaattgaaacgtcgacccataaatcgggttgttcgtctaaattaggatatggtttgttttcggaaggcgcacgccagtcaattggtgtcgggtgagccgctttttttgattttatcgattgttgcctcgcatgcgattgtgatttggtagaggacgtgactgcggcttggtgtgtttgatgccgagctgaggtagaccaatacccaccaattagtaaggcaatggcaacaatgatgctgccgaacattaatcgaatgttgtttgtcagttttggcatggccgacttccttccgcaataaagtacctccagtatacgggataaagcgctaaacttcaatacggattagcttgctctagcctagtatttaagctaaaatagaccagtaatcacgaatgacgaggagcttatgatggttaataaaaatgcaattattttagcagcgggtaaaggtactcgcatgaagtcaaaattatataaagtattacatgaggtttgtggtcgaccaatggtagatcatgttttaacccaagttgaaagaacgcacccaaccaatgtggtcacaattgttgggcacggcgctgaaaaggtgaaagattatctcggcgaccggtcacaatatgcattacaagctgaacaattagggactggccatgcggttttacaggctgaagctttactgaaagatgaagatggcattacgattgtggtcagtggcgatacgccacttttaaccgctgaaacctttgaaaaattatttgcataccatcatgataaaggcgctaaggcaacgattttaacagcaacggccccagacccaacaggttacggccggattatccggaatgatatcgggattgtcgaaaaaatcgttgaacaaaaagatactaatgataaagaagcgactgttaatgaaattaatacgggcgtttattgctttgacaacaagaccttattccaagctttgcacgaagtgacgaataagaacgcacaaggtgaatactacttaacggatgtggttgaaatcttgaagaaaaaaggcgaaattgtcgctgcttacagaatgccaaactttgaagaatcaatgggtgttaatgatcgagttgctcttgctgcagcaacaaaagtgatgcgtaaacgcatcaatacagaacacatgcgtaatggtgtgacattaattgatccagaaaatacttatatcgaagtgggcgttcagattggtaatgatacaattgttgaacctaacgtcgtcttaaaagggaacacaacaattggttcagattgtttcgttggtgctggctcaactattattgattcaacaattgaagacaacattcaaatcacaagttcaacgattgaatcagctatcatgcacacggggtcaaacattgggcctaacagtcatttacgtccaaacgctgaaattggtgaagacgtccatgttgggaacttctgtgaagtgaagaatgctaaaattggcgatcgcacgaagattggccatttaagttatgttggcgatgccacattaggcactgatattaatgttggctgtggcgtagtctttgttaactatgatggcgtggctaaacaccacgcaaatgttggcagccatgtcttcatcggtagcaactcaaacattgtcgcaccggttgaaattgcagatcacaccttcattgcagctggctcaaccatcacggatgatgtcccagaaaaggcaatggccatcgcccgtgcccgtcaaacaaacaaagaaaactactgggcaaaactaccagtagcaaatgacgaagaatggcaatagagtgctggctgtggcggttagtaattgagcattaatacgatgttagattaagcggaaattacggtgacaagaagcacgttttggattaaagtgtgtttgtgacgattagcttagtgttgtaaagcacatcttaaaataaaaatcgtccgtaatcttatttttgagattacggacgatttttttgatacttgtagttattttaaagttgagaaataatcgcgtattaagaaggcgattagaaaagcgggccaaatccaaattgaaccacttgaaaataagattagaagaagtatgataagactcccaacagcggtggttgcccagcccatttttgtaatgcgataatttttaggattatagttcgggtgactagggtagaaaaaatgatactgataaatcaaaacggcaacgaatagaataagaccaagaataaaatagggcatgctgaggtgaaataagcgatcggaagtaataataattaccagaattaaaagatagagattattaaaaatagtgtatttaaggcgggtcatagtaacctcctttttcaatgagtgtaccttgtcttgcgctaaatgacaatttaatccataatccaaaataaacaagcatttttggggatataatgggatactaaacgggaggttcgatggtaatcgctattaactttttctttttctctcacgtttctaatgaacagcgcttactttacaacatttgtgaactttttaagttttaatcttgatttccggggtgaaaatgcctaaactttaaataggtactaacataaattttttggaggctgacatgtctgaacaatatttcgaccctaagttgaaaatctttgctttgaactctaataagcccttagctgagaaaatcgcggctgaagttggggttcctttaggaaaatcttctgttaaacgttttagtgatggtgaaatccagattaatattgaagaaagtattcgtggcgacgaaattttcattattcaatcaacatctgcaccagttaatgataacttgatggaaatcatgattatgattgatgcattgcgtcgtgcatctgctaaaacaatcaatgttgtgttaccttattatggttacgcacgtcaagatcgtaaggctcgctcacgtgaaccgattaccgctaaattagtggctaatatgttaacgatggcaggggctaaccgaattttagcattagacttacatgccgtacaaatccaagggttcttcgatattccagtggatcacttgatgggtgctcctttattggctgattatttcttgagcaatgacttggctgaaaatgctgttgttgtttcacccgatcacggtggggttacacgtgctcgtaaattagctgatttcttaaagacaccaatcgcaattatcgacaaacgtcgcccaagaccgaatgtttctgaagtgatgaatattatcgggaatgttaacggtaaacgcgcaatcatcattgatgatatgattgatactgccggcacaattacgttagctgcgcaagcattgaaagatgctggtgcaacagaagtattcgcatgttgtacacatccagtattgtctggcccagctattcaacgaatcgaagattcagtgattaagcaaatgattgttacagattcaattaaccttccaaaagaaaaattaatcgataaaatggtacaagtttctgtcgggccacttattggggatgccatcaaacgaatccatgaaaacaaaccagtcagtccattatttgaaaacagatttaaaagataagcgtgctaactcgaacgggttagctttggggaagcacatttcattaagctaacaattaaaaacgcctgaacaatttgttcaggcgttttttgtgactttatttttctttgttagctaataaatcgcgaatttcttttaagtaaacttcttctttcgtttcgactacttgtgcttcttcttcttcggtcttcttgcccatgtcacgaagcttgttgaatcctttgacgattaagaagacaacaaatgcgatgattaagaagttaatcacatcgtttaggaagttcccgattttgaaaacagccttggtgcctggaatggtaagcgcaataccggatagatcaacttgtccaacgaataatgaaatgattggattgattaagttctttgttaatgagtccacgatgctttttaaagcagcccccaaaataaccccgacagccatatctagcacattaccacgcataataaattctttaaattctttaatcatgaaaacgacctccattaatattattaattattgctacaaaaagtataccgtatttccagagcctataaaataaaagtgctgtgctagttacataattaaccaataaatttgttattttcatgaaaaatcgttaagatagtcacaggaattaaataacagaaattagagatagaggaaccttagatgaattggattgtacaattgtatcaaccattctttgaactgagtaattggcaaactgtcattacgtcgtcagaagattggcttttaattttaacgttagtgattatggaatgcttactctcagtagacaatgctgttgtattagcggcacagacacaaacattacctacaaaaattgagcaagaaaagtcattggtgtatggcttatggggcgcttatgttttccgcttcattattattggtatcggcacctatttaattcatttgtgggaaattaaagttgccggttcattgtatttaatttacttagtcattgcttatttcagaaagagtgggcatccgaagcaggctaaaacaccggaggcgggttctaaaatcagtagtccgcatcggttctggcgcacagttgcttcgattgaattgatggacattgttttttcaattgattccgtattagcgtctttagcgatttctagtaatccggtgattgttttaatcgggggaatgattgggattatctgcatgcgggggattgcccaactcatcgcccaattgatgaagaaaattccggaattaaatccgatggcttacatcttaattctcttcatcgcgattaaattattcttgtcgattccagccattgactatgaaattcctaacctagtgtttgctggaattgtgtttggcgttattctactgacgctcattattcattatgtccgtgcagcacgggctaaataggcatcataaaaaagccgttgtggacaaatttgtccacaacggctttttacgttacatatgattgagtaaaacagttaaggctgcaaatgcgacacttgcaattgcgactaaaatgaattgatgctgtttcattttgagaattgcaatgaattcacggatgattgcatttggtaagaagtaacgcgatgttttagcgccaatgccatctgctttcaaacgggcttgctttgcaaaaagcccagcgcggaatgtgtggtaattattggttgcaaaaataattttaggattcgttttagtggtatcagccatgataatgtcttttgaaaattgcatgttttgtaaagtgttgactgatttttcctcggtgagggtgtctttaatcggaatcccttgctcaatggcgtaacgttgcatggcaactgattcaggcagcttctcatccggaccttggccgccagaaaagaccagttttggtgcagggcggccttttttgacttgtttatcataaaatcgaatggcgcgattaatccgactggccagtaacggtgggacgaattgaccatcgattaaaccgctacccaagacgatgatgtaatcttgttgataacgggggcggttgaattgatagataatcagtgaggttagatataaatagaagaacaatggaatatacaaaagaaaaaccgatacaatcgtgctgacaaataatttaacatcggcgggaatgtgtaacaagcgcgtgatgattgggatgaaaaatgagccaatgatggctaacgcaatgaggagggtcagcatgttggataacgtgtgactttcttttttccagacaatatacgcgttccacagcaacaagacaataccgaataagtagaagaacatgacgattagaacgacaacaattgcagcagcaattgcaatgttattcagcgtttcgttattgaggcgaatcacaatgagcgcagcatccattaatgcgctgaagaggaaaaagttaaacacaatgccgttgattaattggcgtttttcaaatcgctgtaaaccaatgaataaaatcaaaaagaaaaggggtgacgcgtaaacgagatcaattaacgtagtcataataactccccttatgattaggcttggctttcaaaggcgtatgtttcaatggcgtatgccacgccatcttggccttcatggttactcttagtaacaaccttagcaatttttttcaattcaggaatggcattatccatggcaactgggaagccggcgtattctagcattgatagatcgttaccttgatcaccaatggccattacttcagattgatcaatatttaaggcatttgctaaatcacgcaaaccatttcctttaccggcgttcttgttgagtacttcgaggaagtaggcttcactttgaacaaattgataacgatcgaaaaaatcagcaggaatcttggttttggcttcagctaagacggcgggttcgtcgattaacatcacttttgaaaaggccttgttaggtgcgatttcatcgacatggcggaaacgaacaggcatgttgacgagggcactttcaccgactgtataaggactgatatcgcgattggcggtgtagatgaattgatcgtcttcagcgtgtaaatgagaaccaatttggcgggagagggtttcaagttcaagatattggtcatgcgcaagagtgtgacgcactagaatttcaccagttgccgtattttgaaccaaagcaccgttgaacgtaatcacatagtcagtggcttcagttaaacccagttcttttagaaaaggcgtgaccccggtgagtggtcgcccagtacatagcacaactttaacgccatgttttttagcagctttgacaactttgattgttttagggctaaggatgttattttcatttaatagggtaccgtccatatcgacagcgacaagtttgattgacattataaaaactcctttttagtggttaggattgattgcaccgttacgcaagtatgctttgaactggcggtatattggtgcgaagacttcgatatcattttcgttgagcatttctttagggaaatagaagcgttcatcgccgctaaaacggcctgagatggcggccaccaagtcacttaatgatgataactcttcaagttgaccatcagattgcataatttcaatctgagttttgggtgatttagcggagggatcataggcgtcatacggcaaatcgaaactgttattaacagcagtgtaatactcactgttataaccagcttgctcggttagcgcccgtaattctggtaaaacacgttgggtctgttggctaaaggcaaccgatttgagtgggcggcggcttaaaaagcggtcggccaaatcattgagcactgaatccggatagtctaaccagtatagaaaataggtattcaaaacgccatcatctaattttaaatagtcttgtaaggtgaagttctgttcgaaaaatggaatcaataattgcggtgcgagactctgatgatggtcaggctgttgataaagaaatttcgcacgttgcaagagcttttgcaagataacttccatgccgcgtgaaacaggatgaaaataaacttgttgatacatctggaaccgactgacgatgtaatcttcaacggcgtgcatcccgtttgctaaaaaggcaatgcccttatcgtaaggccgcatgactcgtaaaacacgcgtcaaatcgaattctccgtatttagtcccagtattgtaagcatcccgtaataagtaatccatacgatcggcatcaatctggctggaaatcatctggacaacttgtggattcggataagaatgatcgattacactagcgactttcgcaggaaaatcatccgcaacttgggttaagacgcgattaatggctgtctccgggttggtgataatttggcgcgtaatcaattcatgatcagtattgaagatgtgttcgaaggtatgtgaataagcgccatggccgatgtcgtgcaataaagctgcacataaggcgactaaccgttcatcatcgttccaaagtccatcaccggcaacttgactagggtagttaagttggaattgatcacagatctggcgtgtgatttcataaacacctaatgagtgggtgaagcgggaatgttcagcgccttggaaaacagaggaagtcgtgccaagctgtttaatccgccgaagacgttgaaattcgggggtgtcaattaaaccgagaatcacttgatactcgacgcgaatgtagttatgcacaggatcacggaatactttttcacgcgatagtttaatagcggtgttagtcacaatataatctcctttttgaggcccgttaaacttgataacggtggagtgctgtttggtttttaagtagtagttgttgataagctttcgtttgtaattgtggtgtgaggtcaactagttgtggttgttgaaccaatcggctaaaagcggtctgtaggtgcgtaatggctgttgcaacagtcattggttcgtttaacagatcagataggttggccatggtgtccgggatgaccactgggaaagtccaccgcgtttggctttgtgcttggccagcagtgtaaaaactgtgcatgagtttgccacgcgcctgttgattgcctgtaatgctggcatataagagtacggcaattccgtttttggcacggcgttgggcaataccggcaaatttttgaccattgatgctgagatcgtattcgccagggcaataggagtgagtgacttcgaaatggtcaatcgtgacgggatagtctgcaaaggcagttgtgaacaattggtgcatgagcgcgtaagcagcattaatgcttaggtgatccgccatatcaggaagatagaagctgacgttcaaaacgccggcatccgtcacaatccccaagccaccagcgttacgcacgaaatgggcatagtgtgcagcctctaatgtggcaaccgcttgtggataagcaggtaactttgtatccatcatgcccaaaataacattgtcagcaagcgtccaaaaatgaataataggttgttgtaattcgcggctcaaagctaagaggctattagcatgagcaaaagcgagtggtccagccgctttttcaaaatgttggattaaaatagcccattcttgattggcagataaagtcgctaaatcatccatggtaatcacctccgaaaattaaaaactcttcttaattatagcgtaaattctaggcgctgtctgcaatcggtacgttggtcaaagagaattggcggattattctggcgctcaaattttgaatggcttataatagaactacttaattaaaattaaaggaagttatttatggcaagtcaaagcggaattccggtcaaggtacaccttgaaacgcaaattcaacaagatgggcaacttgaaaaacacgttttcgatgaggatggtcaagttgtcaaaatgggagagtcactttacttacgttatctggaacacggtggtgaacaagccaccgcggtacggtttaaattggctgctgacggtcaaattcaattaacgcggggcacagaagaagacgagacgcaattgcggttgtactttaagcaaggcgaagacctcggatcaatttaccaaacaaaatatggcaacatgccagtgctcacaacgacaacccatttattatcgatggtgaaggaacaaccgttatcaggtgaaattacggttcattaccaacttgccatcaataatcaagccgtgggggattacaaattacgattgatttttacagcttaagctagtataattaaggatagactgttgaaaggacgtgtactggttgaaattagacgtttttaaaggccaaaataaagaagaactatcaatgattgaagtcgcacatgcaattttagaagaaaaaggcgacacgattgcattcgctgacttaacgaatgaaattcaaaactatttaggcaaaagtgatgaagaagtgcgtgcacgcttatcacaattttatacggatttaaatgaagatggtagtttcatttctttaggcgaaaacgtttggggcctccgttcttggtacccatatgaatctgtcgatgaagaagttaaccatccagaagatgaagaagaccaaccaactaagaagaaacgtcgtaagaaggttaatgcattcttagcagatgttaccgacgatgacgatgtgattgattacagtgacgatgatccagaagacgaagacttagatgctgatgatggtgttgatttagcagctacagatgacgttgctggtgatgacttaactgaatacaaagctgacttacaaaacatcggtgacgatgacgatgatgaagacgacgatgccttagaagacggtatcgaaggtcaattatctgaatttagcgatgatgaagacgaagaagacgaagaagacgaagatgacgagctttaattagacgtttccgattcgttgccataaaaaaagacgtcaaagttaactttggcgtcttttttttgcgtttaatatttttaagctaatcctcgtcggatacccgacttacgacacactctcgttcaagaaaatggtaaaccgcgccgattaagttggcgtcttggttgaagtgacaaatttcgatgtgtggcacaggaataggggtggttgcccctgcacggcgttgccagtaacgattaatactactattgtcatcggctaaaagtgcgtcaatcgcagcgtttaattttggtagtaggtcagttcgctgactaatgccaccaccgacaccaataatctcgggcgtgtaagcaacgtttaaaaagagcatgatttccgcaagggcagcatacatctgtgtgacttcttgggtggcaatcggatccccttgatcggcaagttcgaagacggttttgccatcgattgtattggggagtttaaaattacggagggagacagtcttgccaatttggacgggtgagacttttgaattgttgagtgttttaatggcatctgcgatgaatttttcgaagttatcgattttatcagcagtggttttgagaatggtcccattttcgataatggataagccaatcccagaaccaatgattgtgaataaggcgctcagatgaccttgaccaatcccagctgtcatctcggcgagtgctgcactatcggcatcattttggagagagacgggcagaccaaggcgcgttgcaaattcagtttgaaattcaccgaggtgcaaaaatggcacataactcatgccatggatgatgccagtctgttcatctggatcaccaggacaactcaccgcaattccagttaaatgaaagtcggtcgcaaattgatcacgtaattgttcaacttcggaatagaagcgattgcgtgttagcggtgtagggaattgcgcttggttaattagttggtgtttcgtccaaatcccatatttgacggcaaaaccgccgatatctagagctagtaacgcgtcttgtagcatggtgggccatcctttcaaagtaggtcatgcaaatagtgtagcataggcgatttaaaatcggcgcagaaatgactaatttttttgcttgacgctaattgccatttcttgtattatattctttgggcgctttgcagttactttaattgcgaagccagaatcggttaacaggctccctgttcattttgaatagggagcttgtttttgtttttggttgtttcccaaaagcatgaatgtttagcgtaatgctaagaagaaaaggagaatatttatatgaccaaatatgtttttgtaacaggtggcgttgtttcttcacttggtaaaggaattgttgcggcttcacttggtcgtttgttaaagaatcgtggattaaaggtaacgattcaaaaatttgatccatacatcaacgtggatcccggtacaatgagtccttaccaacatggtgaagttttcgtaacagatgatggtactgaaactgatttagatcttggccattacgaacgttttatcgataataatttaaataaatattctaacgtgacgacaggtaaaatttattcagaagttttacgtaaagaacgtaaaggtgaataccttggcgcaactgttcaagtcattccacacatcacaaacatgattaaagaaaaaatcatgcgtgctgctacaacgactgattcagatatcgtgattactgaaatcggtgggactgttggtgatattgaatcactaccattcttagaagcacttcgtcaaatgaaggcggatgttggcgcagaaaactgcatctacatccacacaacattggtgccttacttgaaggctgccggtgaaatgaagaccaaaccaacacaacacagtgttaaagaattacggagcatcgggattcaaccaaacgtcttggtttgtcggactgaaaaaccaattcctgatgacatgcggaacaagattgcccaattctgtgacgttgaaccagaagccgttgttgaatcacgcgatgctgaatcaatctacgatattccattgttattgaagaaccaaggcttagacgactttgtcttaaaccacttcaagatgacagcaccagaagctgacatgacagaatggattgatatgttacacaccatcaagaatcttcaaggtacaaagaagattgccttggttggtaaatatatcgaattgcaagatgcttacatttcagtgaacgaagcattacgccatgccggttatgcttataacaccgatgttaaagtgacaccaatccaatcagaagatattacgaaagaaaatgttgctgaaacattagctggctttgatgggattatcgtccctggtggtttcggtgatcgtggtttagaagggatgatcctttcaattcaatatgcgcgtgaaaatgatgtaccctatcttggtatttgtttagggatgcaaatggcaagtatcgaatttgcccgcaatgttgctggcattacagatgcaacaactggcgaagtacacccagaagcaaaacataaattaatcgacatcatgtcagatcaaaaagatttagaaaacatgggtgggacacaacgtcttggtttatacccatgtaaattaaaaccaggtacaaagactgctgctgcttatgataaccaaagtgttatccaacaacgtcaccgtcaccgttatgaattcaataacgaataccgtgaattgttgacagacaaagggctagtctttgccgggacttcacctgacaaccgcttagtcgaagtcattgaaattccagaaaacaaattcttcgtggcagctcaatatcacccagaattcctatcacgcccaaacaaaccagaaggcttgttcaaggcatttattggcgcaacaatgtagagtgctgactcgaacgggttggctttgaggattaacaagaaaataaggattatggcgttctttagccataatccttatttttaggttaaccggaaaaggcagttcgaggaagcacgtttcataaaagacgctactagtcagcacgacaaagtagcgtctttttgtatgccgaaaaatagttgtgaaaatggagatgagccgttttgaaaagccttacatttttagacttcgatagcccaattgaatgcgatgattagcttttactaagtatgaaaattaaaaagtaaatgttatccctaaatgccttgtaatttatgtgctgattaattattattatacatgtatgactaattatcaacggcattgagtagattggagccgtttttcaattttaaaaaataaaactaaaaaattaaaaaacttaaaaatatcaaaagcgccttctggtttaaaccacaggagaagtgggaaactgaaggcggttcttttgttgcagagcgaacggggaaatctaaaaatgaaaaaaatgttaattcaaggtggcaatctcttatctggagaggtcacaattggcggtgcaaagaatagcacggttgcgattattcccgctgctattttggcggagtcgaaagtcgttttagactgtgtgccgcacattaaagacgtcaacagcctactatccattctagaagatatgtctgtctcatctacttttgctgatgacacggttgaaattgatccaacccacattatttcgacaccacttccaagcgggaagattcaaagtttacgcgcctcatattatttcatgggggctttattaggtcgttttggggaagcaatcgttgggttgccaggtggcgacgatattggtccacgaccaattgatcaacatattaaagggtttgaagcacttggtgcgacagtgactaataaccacggtgctatccaaattaaggcaccaaacggcttacacggtgctaaaatttatcttgatatggcatcagttggcgcaacgattaatttattattagccgctgtccgtgctgaaggacaaactgtcattgaaaatgcagcacgcgaacccgaaattgtggatatcgcgacattcttgaacaacatgggtgctaagatccgcggtgctgggactgacattatccgcattgatggggttgaacatctgtatgggcgcaatacacacaccattattcctgatcggattgaagcgggaacttatttaagtatggctgcagccatcggggatggcgtgaacgtcaagaacatcatcagtgaacacatggacgcttacctcgctaagttagaggaaatgggcgttaagatggatgttaaggaagatagtatcttcgtttatccatcacctaatttaaaaatggttcaaattaaaactatgccatatcctggctttgcaacggatttgcaacaaccactaacgccgctcttattaaaagcgcaaggtgaaggcattgtggttgataccctttatcctaaacgaacacgtcacgtcccagaattaattcggatgggtgcagatatctcaatcgaaaatgatgtgattattttacatcatgccgacaagttacaaggtgccgaagtatccgccgatgaaattcggggcggtgcttgtttaatgatcgctggcttaatggccaatggtgtgacaacgattgataacgcaagtaatattttgcggggctatgaccgcgttgttgataaactaacgggtctgggcgcaatcgtcaaaatggttgaagaataagttaaccatctattgttttttgttagcattcatgctaatatttaatggttatgtaaacaaatatctctgacatagcaaatatctcagggcaagacttaagttgtgcatctgaattgatgcagataactttagcaaaaaggagcggaaaagacatgaaacaaggtattcatccagattatcacaaggtagtatttatggattcatcaactggcttcaagttcatctcaggttcaactgctaactcagctgaaactgttgaatgggaagacggtaacacatatccattaatccgtgttgaaatttcatcagattcacatccattctacacaggtaaacaaaagtttactcaagcagatggtcgtgtcgatcgtttcaacaaaaaatatggttttgcagacaagaacgctgccaaataattattttgaaaccggggaatttttccctggtttttttttgcctttttttccataaaaatagccaattgcaaacggcaatcagctatttaatcaacattttttgaattcgatgactagcgagacacgctagcaaaatgactgggaaaaattgaatcgggaaaagaaagagtaacaaagtagcagtgacgtacggttgcgccacgatcaccgtacaactgacagcgacaaccgtggcaaccaggaggccgggagtgtatggcaatacaacggcgagacttaaaccgattgccgcacttgcaaagatggctgggaaaattttaccgccccgccaaccaaaggcaaatagcagattagttagaacggtttttccaagtccgattaagagtaaataaatgaatgattgatctaaaccggatttggtaaaggtgaacaagtagtgttctccagaaaagagtaaataaggcgacaatagaccacaagcacccaagaacacaccagcagctatcattgcaagtaagaccggccgctgaatcgtatcaaagagccactggcaccattgttctatttttaagaatagattgccaaaaactcaaccgacaattaatgctaaaataagaagtggccaaactattaatgtccaatgaatgattggtgtgtgcagtgtaaatggactttctttggggaagagttggttgaccaaggcgaaaccaagaatcccagttgcggttgtgagaatgtataatagaacttgattgaagtgtgatttgaaatgatcgcgcaaggaggttgtctcaatcgcctcaccaacaccggctagcggtgcgtggaagatggccgctagcatggcaccaatccccatcgtcaaaaacgtttctttagtttaagtcgatcgcccaaccaagtgattaggccgccgacgttggtcgagagcgcggcttcagggccaaggctagcgccgcaggctaatacaactaaggcggcgataatgtttttaccgacttgctgttggtaggcaacggacccggtttgtttaaattcgctgagtgtttcatgcattgttttaggataaggcccccaataacgttgcattaagccgacgagtaatccgccaaatagaccaacaagcaacggataaaatggctggttgaaatgcgaataaccgacttgccaaattaagtgtgtactgaaattaatgagggctaaaaaggcggccgctatgccaccaatcaacaatcctaaaagtaagctatataaaacaaaaataattttaaactgcgtggttttagtggtaggtgatgacatagagcctcctagttaagggaattatttatgaactattatgcactacccacgctagtttgaccatagtcgaattgtgagggaaagaataatgaaaatcgatcgattacaagcatttagcgatggcgtttttgccattttattaacactattagtgttagactttaaagtgccggactatcaagcagggcatttgagtcaagcggtgattgcacagtggccaactttggctgcctatgtactatcctttttttatgtggagacattatggttgtttcatcacgattattttgcgaaaataaaacaaactaactggcagttaaacgtgatcaatctcagtattttatttgcagtgacactgattaattacccaactagtttgttgtcggaatcgattgctcaacaaaatggcgctgatattcgatttgcttttacatcgtatgcgattgttgcattagtcatctcagctttgttttgggtattatatcggtatatggcactgcatcatgaactaatgcgtcagtatgaacagcgacacgaggaattttatcaaacgattaaaaatgatcccttacgaagtgtcttgatttacgccattgccattgtcggcattcagattaatagctggctaggggcactgttgattttgctgggcaatatctttcatttcatcgcatacttgcgacttagtcggagtgtcacgctgtatcatttgaatggaaaggatgaataacatggcaaaacaaagaacaaattggcggtgggtagattggctttatgtcttcaccattgtgggtcaattaatctatattggttattacttagaacaaatgctgactaaccccaaagacaacggaacattgtcttttgccgttttacaagtggttgcaggcctggtgattgcgaccttacctattatcattgaacgctttatgccataccggtttccagagattctatatgcagtttatttaatctttgtatactgttcgattttattggggacgggattacatttttatagtcgcttatactactgggataaattcttgcatgtcttgagtgccgggttattggcgggcttagggtatacagtctttaacgtattgatttcaaaacaactccgtcaaaccatttcagccttactcatgagtttgtttgcggcaacgtttgggagtacgattggtgtgttgtgggaattctatgaatttaccggcgatagtttgttaggcttaaacatgcaacgttatatggcaaaaggtcaccttttattaggccaagcagccttgttagacacgatgggggacttactagcggatgtcttgggatcatgtttaatcgccattatcggctatttctgtattaaacataaccgggactggttagataaactgacgtttaccaaaaaatagagtgcgtttgtggcgcttatattttgagcattaactggatttgacgaattggcgattgtaatcaccgatttggcaaattctgttaagcgcagaaatatgccacaaaaagcacgtttcaacaaaaaagtggtgtcgctctgaaaatgagcgacaccactttttcgtattatttttgtatttcatgttcttcgcgtaagacttttgtattctgacgcacccagaagaggttgacgattactaaaacggttgtcgataggaaaaccccgctgtaaccgaataggccagaaacgctggaaccaattaaaggtccggcgacattccccattgcttggaaggattggttataactgaaaatccgtccggcggaactatggggtgagtacttcgcaagaatcgtttgaacttgcggtaacaatgcggcatcggcgaccccaactagcagacgcagggcaccgagttgccaaacattttgaacgaaagcttgcggaacgtaaacgaagacggcgaagatcaagccaccgagtaaaattttctcggaaccgatccgatcgccaagtgcaccaaaacgcggcgcggcaattaaggttgcgatccctggagtagccgcgacaactccactgactaacgctacgttattgccatgatgcattaattgacggacatataaactcaacagcgggctaattgagttgttggaggcttgaataatcattgtggtgacgaacatgccgataattaaatgcgggtatttcaattcatgaatcagttgccgaccgggtacttgatcgcctttttctactggcgtgaagtcttcgtgaacgaaaaccagacagaggataaagacgatgaacaagatggtaccggtaatgaagaaggttgttcgatagccggttgcttgagcgataatcccacccaacaacgggcctaataaggttccggaaacacttccggtggtcagggtgcctaaagcttgaccacttttttcttgtggtgctgaagtggcaattaaggcgtttgaattactgatataacccgagaagaagccttgtaatagtcgcaaaccaattaattcataaatattttggactaagcccatcgcacccaggacaatcgctagtcctaatgaggcgcggagtaacattaatttgcgaccacggcggtcagcaattttgccccaccatggtgaaatcagagcggtaaccaagaaggtaatagaataggtcaccccactccataaactcagttgggccgttgtaaagttgccaagtgtgtcaatgtataacgacataaatggcataatcaaactaaaagcaaccccggccatgaaattaccaaaccataaaacgacgaggttctgttcccattgtgcgcggcgtctgaataaacgttgacgaatgttagtcaacatggtgtcatcatctcgattctaaaaagttaaagcggcgaccacgcttgctgatgtgcgtggtaggcgtcttttaagtgtgggagttgttcaaagagggcagtcagttgcgcatctttagctcgtggcagctggcgtttaaagtacaaccgctgagtgtcgtaggcagtcaatgcgcttgcttgttgggctggtgtaccgtgttcggtaaaatagagtagccaatcaaacagccattctttatcagcatcggcttcataacgggctagcaaagtgtctagctgtgctccctgtgccactaacaagtaatggttacgctgcaaaggggttaactcattatctggatttagattaattactttgggacctaattgttcgagaaaactatccagcgaatcagcaacggttaaccattgatcgacctcagtatctatgtagcgaatcggtggttcagctgaggcttgttggcaatcaaatacaaagtactgctgttgatgctgactaaaagggactaagtaatcgggcaagtcgggggcttggatgactgcttcaccgttgtgagcaatcccagctaaataatgacactcaacgtcggcgagaccatcacgtgttggctcactcgtaggaaggctaaagttagtcaaaaaaccgccattggttgtttgacaaagtgcccgataactcatgggaatccgagggtcatcgacaatcatccgtggtgcagttaaatcaacattcgcaattgctggctgtgcagtaaacatgcaagtatccctcccaaaattggtaactctttaattttaccatttatgtcaaaccaaggttttgttaaggttggcaacctattctttatttgttgtagcgagtctgataatatgaagacaacattaaagaaaagaggatacgcgtatgttgtggtttattattatcattattttgttagtggttggcgtggttggcttctatatcagcacctacaataacatggtcaagagtcggaactggacagatgaagcatggagccaaatcgatgtacaactcaaacggcggaatgacttgattccaaacttagtatcgaccgtgaaaggttatgctaagcatgaacaagacacgttggaaaaagtcatcaagatgcggaatcaattggttgaaatgccagctgataatcggcaagcaacaatggaggcttctaatcaattaacggattcattgaaaagcgttttcgccttgtcagaaagctatccagatttaaaagcggacgcagaatttacgaagttaatggaagaattgacgaatacggaaaataaaattgcgtatgcacgtcaattgtttaactcaagtgctacccgttacaacaaccaaattcaaactttccctggtaatattttggcaggtgctcacaatttccaaaagacagcttacttagaaacgccagttgaggaaaaagcagcacctaaagtttcctttgaatagggtgtgattgggaatgttatttgaacaaattcaacagaacaaacgtaaaacggtatatgtgatgattggcttttttgctttagtattggcaattggggctgcattagggtatctgtttatgcgtaatttgattagtggtgtcgtggtggcggctattttagccgccgtttatatggcgatgatgattggaaactcaaccaacgttgttatgcagatgaatcatgcgaccgaagtccatgatgctagcgaatatcctgatttatggcacattgttgaagacatggcgatggtcgcccaagtaccgataccccgggttttcattgttgacgatcctagcccaaacgcgtttgcaacaggcaatgatccacaacacgctgcggtggcggtcacgactggcatcatggcgcgtttgaatcgggaggaactcgagggggtaattgctcacgaagtctcccatattcgcaattacgatattcggttacaaacgattgccttggcactttctgcggtgatttcaatgctcgtgaacatcggcagcaacatgttatggtggggcggcggccgcagtcgtgataacgaccgtgaagaaggtgcaagtaatatcatcggtttggttttttcgatcctattgttgatattgggacctttggcggctagtattgcacagatggcgttgtcgcgaaatcgggaatacttggctgatgcatctggtgtcgaattaacgcggaacccacaaggtttgatcaatgcgttattaaagatttctgacagtgagccaatgcaagctgcggatccatcaagcgcagctttgtatatctcagatccatttaaaggacttagtcggtcgggtgctcatttatttgatagtcatccaccgattgaagaacgagtcgctaaattaagagcgatgtaatgttttaaagacataacgcatcagctgtaggtaatagttgatagaacacgttttatatagagggaggcaaaattcatttttgtccccctctttttttgtataataaaggaaaagaggagtgatcagtgtgcgattatccccaatccagcagttaatggcgttacaatctactctaataatgcaattgaatgagacaccgagcaaacagattaccatgattgatttaccggttgtgcgtggacaattattattggcattgcatgcgcgtcaccagctaacattatcgacgcaacaacgcacaatgattcaacgcgccatcatcacaacgttggcaactaaaacggatggcactcaattaatggatctttggcggcaaacactaccgcagcggtatcggattgttgatcaggcagaggtggtggcccattttgaacagttagaacgcgctaattgggacgttgcgagtttacgcgcttatgcaacccatttaacgggacaacttgctgcgcaaccaacagcgcttaaaaggattttgcaacacaattggcaagcattacatcaagtaggctcagcactttatcaaatgctttttgaagcatacggggaccgaactgcacaaccagtaattaattaccagcggatcaatttagtgctcacgcatttaggggcgcagttggatgagcatgcgtttttgcaattaacagcacgtgattatcaacttgacccgcaattagcaccagatgcgccttttttagcaacctttgcgcaaagtgtgcaacgtgcatttgtcggtcgagttttaaccgataaacggattcatcaattcagaatgtatttagatcggcagaatctacgctatatccgccattattttcaacactctggtgaaacagatgaacaagccttagcgcggtttgtgcgaaaacgacaagcgatccagccacattattggctgcggcgtgaaccagctcggctccataataaataccgcaacggacagcgcccaacaacgcattggaatcgaaaacgactcacgccggattttcatagtgaatttattctagcaccatctggagcatttatcagtcaatggcaagtgcttaaattaaaggctgatggtctgattgatagtaatcctgaccattaccagctagatgatggcacactccggcaactactaaacggtgaatcgtttaattatgctaatcggaatgatcggcaacacgcccggttagatagccaaccaccgctgcaaaatgatcatgcactacgcaaaacagcttttaaagggtggcggagtccgactaagcaacaatatcgaccaaatgataaacaggttgatgactattcacggtggtactcttaattggtggtcaatcatttttggggcttttttgaaactatggtacaatattgcgtagtattttaagccataactaaaaaaagcgtgcgtaaaaatgcacacagagtaataggagttattgagatatgaaaatgcagttgggtgaaattgcacgagtcactggggctaaaaacgatattgaacaatgggcaaccattgaagtgacgaatgttgcgtttgacgcacgtcaattaaatgcgggcgctttgtttgtaccgttagctggtatgcgtgatggtcacgactttgttggacaagctaaggaaaatggggcagtggcaactttttgggctgccaatcatgatgcacagccaactgattttcctgtattagtggttacagacccactagcggcttatcagaagttagccatgcattatctccaaaaaattaatcccaaagtggttgcgattaccggtagtaatggtaaaacaacgacgaaagatatgacagctgctgttttaggtagtcagtacaatatgcacaagacacaagctaactttaataatgaaattggtgtgccacaaacgattttatcgatggaagctaatactgaaattttagtgattgagatggggatggatcgcccaggtcaattaaaagcgctcagtgaattagccatgccagatgtcgcagtcattacgatgatcggggaagcccatatcgaatttttcaagacgcgtgataagattgccgatgctaagatggaaatcacagatgggctcaaagaagatggtctattaatttacgctggcgacgaaccgctattgactgaacgggttggcgaactcacaaccgagacattcggtaatttgacgaccaatgacttatatcccttacaagtccgtgcaggtgaaactgaaacgtcattcaagttgaatgcttggccagagatgacgtttacgattccaatgatgggtgcttataatgtcaataatgcgttggccgcaattttggttgggcaacggttccatattaaaccagaattaatgaaaaaagccttggcgaattttgaagtcacaagtaatcggacagagtggcttgttggtcaaaagggtgaacggatgttgagtgatgtttacaattcaaacccaacggctgccaaagaagttttacacaatttcagccattttgagactgacgggcggcggattgccgtcttaggcgacatgttggaacttggtactgccagcaagaaattacacgaaagtttggcccaagaattagatcccacgatgattcaagaggtcttcttgttcggggatgaaattgaaccattatatgtgacgttaaaagagcgttatgcaccagaacgcctccattactttaaccgccatgaacaaacgcaattaattgctggcttgcaagcgcaggtacaacctgatgatttaatcgttttaaaggcaagtcatggcttacatttagaaaaagtagtcgctgctttacaagatactgaagttaattaatgattagcaattgacagacaactgcacaggcacgctgtttagcgattgaagctatggaattagattaacaattggagcaattccgtttgctaattaagttgtggcatgataagctattaaggagcttttttaatgaaaaaggcttttgaaaacaattatattacaagacagatttttgaaaatggtgcaattgacgaagtggacctgttttgtaatggcatgttttttacaaaacaaggaggaacactatttgaaattcgcagaattaggtttatcagaaccaattatgaaagccatcgaacgcgctggctttgaagaagcaacacccatccaaggcgaaacaatcccattggcattagctggtaaggatgttatcggtcaagcacaaactggtaccggtaagacagccgcttttggtttaccaatcttacaaaacttagacttagacaatcctaacattcaagcattgatcatttcaccaacgcgtgaattggcaatccaaacacaagaagaactctatcgcttaggtcgcgaccgtaaagcgaaagtacaagttgtatacggtggggctgacattcgtcgccaaatccgctcattaaaagatcacccacaaattcttgttgggacaccgggtcgtttattggatcatatcaaccgtcgcacagttaaattagaccacgtgaaaacattggtcttagatgaagctgacgaaatgttagacatgggcttcgttgatgatatcgaaagcatcatcaaacaagtgccagaccaacgtcaaacacttttattctcagcaacattaccagcaccaatcatgaaaatcggtaagagcttcatgactaaccctgaaatgatcaaagtaaagtcaaaagaattaacggctgacttaattgatcaatactatgtgcgggcaaaggacttcgaaaaattcgacattatgacgcgtttattcgatgttcaatcacctgaattaacattaatctttggtcggacaaaacggcgtgttgatgaattaacacgcggtttgaaggctcgtggttacaatgctgaagggattcacggtgatttatcacaacaaaaacggatgagcgtcttgaaatcatttaaggctggccgtttagatatcttagtggcaacagacgttgctgctcgtggtcttgatatctcaggtgtgacccatgtttataactacgatattcctcaagatcctgatagttatgttcaccggattggccggacaggtcgtgccggtaagtcaggcgtttcagttacttttgtaacaccaaacgaaatggaatacttacacatcatcgaaaacttaacgaagaaacggatgttaccattacaaccacctacagaaaaagaagccttcaagggccaattagctgcagcggttgcagacatcaactcaatgattgaaaaaggccaattggctaaattcagcgaagaagctgaagaattattgaaacaattctctgacgttgaattagcttcagtgcttttgaagacaatcagcaaggaatcagttcctgttaagataacaccagaacgtccattgccttcacgtaaaaaaggtggcaatcgtagcggcaaccggaatggcggcggcaatcgtcgtggcggtaacggtggcggctatcgcggtggcaatcgtcgtggtaatggcgatggcaaacgtcgtggtaatgacaacaaagacggtcgtcgcaacagtggcaacggcgatagcagcaaacgtcgtagcaatgataatcgtgacaaccgtaagaagactgatggccggtcaaaacggaacttcacaattcgtacaaacgataaataagactttttaaaaacagcgggcggccaacttggtcggccgctgttttcatatagtcaattgtgacagagatgtaagttcagtctctgtcttttttgtggtaaactaattaaaaatagggtactaggggcgaagacgatgattgctggattaggcattgatttagccgaaattgatcgatttgaaaaagcacagagtaagaatagtcattttgctgaaaaagtattaacagctaaggaatatgaactgtttaaacggtatacggggcgccgtgcgttagaatttttagcggggcgctttgcagtgaaggaagcttttagtaaagcttatgggactggtattggacaggtacaactgcaagcgattgaaacgttaaatgatgcaaagggcaaaccctacatcaaacaagatttatttgagggaactgtctacgtatcactttcgcatacaacgacgttagtgatggcagaagttattttggaaagaggttgagacgatgacagtcggctacttacgaccaacacgcattctagttgatcaaaacgcaatttatgaaaatattcaaaatgaactaaaggatttaaaaggcacagatgcagtgattttccctgtcttaaaagcaaatgcttatgggcatggcatgattcctgttgcagaagcggcccaagcggctggtgctgcaggattttgtgtggctattttagatgaggccttagctttacggcgtgctaactttacggaacccattttggtgctagggattacacagcccaccgaaatcgaattggtgattgccaaccaaatctccattacggtcggctcactcgaatggttgcaagctgcttacgaaattgcccaacaaataccttatccacaaccaatgcacattcatttgagtgtggatagtggtatggggcgaattggttttagagatgcgactgaattactagcagcagccacatttatcaaagcacatgcgaaatattttgatttagaagggatttttacccatttcgcaactgcggatgatcccgatgatacttattttaaagaacaaagtgcccggtttaatgaactagtagccgtgttaccagaatgtccacgatttgtgcatgtttcgaattcagccacgagtttatggcactcagcttgcaatgagaatttaattcgaatgggaattagtatgtacggattgaatccttcagggaatgcgattcctgaattgccttatgcattgaaaccggcgctaagtcttgaatcagaattggtctttgttaagcaagttgaagccggaagtaagattggttacggtgcgacttatgaagcgagtgaatctgaatggattgggacgattccaatcggttacgccgatggttggtctagacggatgcaaggctcaaccgttttggtggatggacatcggtgtgaaattgtcggtcgggtctgcatggatcaattgatgattcggttacctaagcaatatccagtggggaccaaagtagtttttgttggtaaaagtggtgatgacgaaattactttacaagagatcgcagattatgcagggacgattcactatgaaattatctgtggtttatctgatcggttaccacgggtttacagtggaattgatgaacattaaggattgagaatttgattatcgccagttctgtggtaggatgaataaaggttaaagtgttgattcggaggttgatgcagatgaaagctaaccgtgaacaattatccgttaaattagacgttgagttggtccaagcaattaagcagtattgtgaggtgtatgcccttgatgagaatgatttgattcaagatgcgcttcacgaattcatggcgaccagacagtcaaaagtagataacgtcattaatgggtacgctgagatggctagcatcaacagtcaaattgcggctgaatttaacgcttgcgaaagtgaggcgtacgcacacattcgcgtagttgattgatcctaattggagggagaacaagtgggagaattaatacagcgtggcgatattttttatgcggatttatcaccagtggtcggttcagaacaagggggcatgcgtcctgttttaatcattcaaaatgatgtgggtaatcaccatagtccaaccgtaatcgttgccgcgattacagcaaagattcaaaaaccgaaattaccaacacacgttgggattacggccaaggataatggtgtcgaacgcgactccgtgattttattagaacaggtacgaacgattgataaacaacgcttgaaagatcgcgtcacacatttagtggcggataagatggcacaagtcgatcgggcgctcaccattagtgttggacttaaagcggtcttaaatccttaatacataaataccaaaaagaaagaatgaagagaacccgcttataaaagcgggttctcttttttttgacctttatcaacagccggtaaatatgatatgatggtagctgttcgaaaaaacgtggttcgtaaccatcccacgcaaaaaaactaggaggattcaaagatgacgaatcaaagtcgattaaaaacggtgattctaaacgggttagtggcagcattatacgttgttttatcgttattcccaggtatgttgggatttgcttcaggagccattcaatttagaatttcggaaggcttaaaccatttagtggtcttcaataagaaatatctatggggtgttttcggtggggtattagtgttcaatttctttttcagttctgaaaacaagttactcgatacgctttttggtggcgggcaaactttattggcgctgcttgtattaacgcttgtgatgccctatttaaaacaaacttggcaaaaaatggtggtcaatattctcttgttcaccgtttcgatgtgtatgattgcgtggatgattgtgttaaccggttctactgctagcacacacattccattctggccaacgtatatttcgttggcactttcagaagcagtcatcatggtgattaccgcaccagtaatgtatgctgtggataaagttgtgcactttgatgcacaaatgaaatcataaagattaaaaagggcagtcctaattaggactgcccttttttgcgttaaactaaatcatcaagtttggagtcatcacggagcgccttatcagattgtaaatcatcgatttcaggaacacgatagccttttttctcgagcttataaacaatctttttcaaaatctcaagatcaagtccagcaggcaaggtgaaaagggtgcgtcgtacgaattcatcttgcttagcatctaaggtgatgcagctggcgattgaggtatatttagcgataatcttcgacatggcaaccaaatcaccttgttcaccagaagaaagcacagtgagtacatagctacttaattcgagattccacgcttcagaaagcatatttaataacgtgctatgcgtgagaattccgtaaaaattgctatcttcgtctaatacggcgatgtatggcaaatctttaatgttgaagaatactttgaaaaacggtgcgtcaactggaatatacttggtcatattcttcaataagctggtcacgggaagctgcatatcgcccccttgagacttatgacggtagatgtgcatcttatagatgttaccgcggaaaatcttgccgctagcatctaggacgggcacacaacggtaaccagactcttctagtagctgtaatgcttcttctaaggtcaccgattcaacaattgtggtgagacgttctttaggtaaaactagggatttaatgagcataggctttctccttagattaaaattctctcatatactaatgtaatcatagcataccaccaagcagattaaaataactagtttttcgactcagcgaaaacttgattagtaatcgatgagaaagaacgtgaaatctaagcaataaaaaagcagggataaaagttaattttatccctgctttttatttaatcgttgagcttactttttctaaacgaattctgtaggtcagctacctctggttaatccgtagaggagaggtgttgctagtacactacgtctaaatcactacaactggaatgccttcgctaacagtatcgtagagtttagccattgtgccaggtggggtattgatacagccgtgtgagccgtgttctttataccagtcaccaccgtacttaggttgccatggcgaatcatgaatcccaacgccagtttcattgattggcatccagtaattaactgggcttgcgtattcgctgaccccatcaaagttcttccccttcaatgtggcattgcgttctttcttccaaacgctccaaacaccggttggggtgacttgtggtggacgtgctgaaacgatatcagtgtcaattgtgaccttaccatcttgatagagccacatatgttgggcttttaaatcaatttcgatgtaggttgaaccgacactacgcgttttctgatcagttccggaaccacggataacagctgttcttgagaaatctttgcccttaggcacttctgtcattaaggcgttgatttcatcggcaggagagatactccacccataaattccagctgggacagtgactgtgccttcttttgtagaattgaaggtcaaatctttgtcaaaagtatcatactttgcttttaattgataaacgtatttggtaagggcagctttatctagactaatggtaccgttgttatacgttaaccaactttggatgtcttctttaggaacttggaaatcattaccattaactgaatagctgattttttcattagcaatcgtcttcaattgatcggcagtttttttcaattgcttgtctgtagatttcacttcaggttgcgcataatcgttttttaagtcgattgttgcttgaccttggttaatgccgtgggcaactgcttttttgaacttagcggcatcaattgtgttcccgtagacttcttttacgagatcgaattgatgattctcgaggttaatatgggcattctctgaaggtttgcgattagcgttgaccttttcgagggtttccgttgagaatttgtcaaaatcagcggcatttaaaatgagtgcgtcttctgatttagttgtttgttcactggcaaaaacgtggcctagccaagaccaaccgttttggctttttttaatcttttccaataacggtttaaaattatggctaaagccagcttcttgaccgctaaaagttagcaatgtttgattgttatcctttagcgtatatttttgacgattcactttttttaagagttctgtgttagcgcctgcgactgatcggccactaatgttgacaccggcaacggtcgtatgtggcaagaatgctttttgataatgaagactgactgccgagtaacctccaacaaggataacggctgctacgccaagggcgacgtaggctttcttcgtaagtttcacaacctcaactccaatctctgcataggttaatcataccccagtatcacataaaatacaaaggcgttaactaatagttagcatacaagatatgcacccaaaaagaaataaaaaagtattatttttaataaaaaatatgtagttgataatattaacaccataaaaaaacgactctcattaaatgagagtcgtttgaccaacagcaaagagcttattggcgagtttcgatatctaattcagcaaatgcttttgtaacgatatcttttaattgttttgcagaactgtgcatgctttccatttcgtggtctgtcaatggaatttcaaggatgcttgtgatacctgagcggttaataacagcaggtgaaccgataaagatatcgttcaagccgtattggccttccatgtatacagataatggtaagacagcattttcgtcgtctaagatagccttagtaatacgagctaatgcagtaccgataccgtagaatgtagcaccttttaagttaatgattgtgtaagcagcgtcacgaacactttcgaagatcttaacaagttcttcttctttaacttctggatgagctttaacccattcagaaatcttgataccaccgatgttagcgtgtgaccatacagggaattctgtatcaccatgttcacccatgatataagcatggaccgaacgtgcgtcaacgttaaccatttcagcgatgtctttacggaaacgagctgagtcaagtgatgtacctgaaccgataacgcgttctttagggaaacctgataatttccatgtagcgtatgtcaagatatcaactgggttagcagcaactaagaagataccgttaaagccagattcaacgattgggtcaacgattgtcttcaagattttaaggtttttacttactaagtctaaacgtgtttcgcctggtttttgtggtgcgccagctgtgataacaacaacgtcagcatcttttgcatctgagtattcagcagcatagattttcttaggagaagtgaaagctaatgcatcagataaatcgattgcatcaccttgtgttttttctttaaagatatctacgataccaacttcttgtgcaataccttgtaaagttaatgcataagcgtaactagaacctacagcgccgtcgccgacgaggataactttttggtgatctttttcaatgtttgccaatataatgacgtcctttctgtaaatcaattcttcatttcgaaaaccagtatagcataatttacaccaaagttcgcgatttttggttaaattttcagaaaactatttctttcacaaagagagaaataaactgaatatggtataatggttcttaatatcaactggcgactggggagaattaactgctcagaatttttgcgtgatagcgccagtcaaaaagaggacgttaataatgaaaatgattgttggcttgggaaacccaggcagtaagtatgcaaagacaaaacacaacattggttttatggtgattgatcaattatgcgaacggtttaatgtgaccttaaacaagcatgattttgaagctgaatacgggagctttaaatatgaaggggaaacgattttcttagtgaaaccactaacgtttgtgaatgattccggtcgttcagtcgggcctttaatgaaatactaccaagttaacctagatgaattagtagttatccaagatgatatggacttaacgctaggcaagttgcgcttacggcaaaaaggttcagcgggaggccacaacggcattaagagtatcatcgcaagtgtccaaagctcagaatttaagcgtgtcaaagttgggattcaacatccacaaaaaagtacagtcgttaactgggtcttaacgccgtttgacaaagacagcgcaccaattatcaatcaagcactagaccaggcatgcgaagcactagaagactggtgccaaaacgacgacttcatgaaaacgatgaataagtttaattagagtgtcgttggcagttggtcagattctgagcatttgcctaacttggcgaattgacgctgcaagcggcgatttgaaaagtgtagcaaagcgcaggaatctactgccaatgacacgtttcaaaaaacagagcgcgtttcttcgcgccattataataagaaagtaaaggaacttttacatggatttaatgacaatgctggggcagaccaaacaggtgcaatccgttttaaagaatcaacgaccagggattaaacaactacttacagggctttcgggatcagcgaaaaccctgtttttggcgacgatttataaacaacaacccttattgattattgagagtaatacgttccaagccaatcaagttgctgatgatttgagtaatttactcaatagtgatcagatttacactttcccagttgaagaagtgatggcggctgaaatggcagttagttcacctgagtccagagcggaacgtgtgcgaacgttgagttttttagcaacaggcaaaaaaggaattgtgattacatcggtcgcgggcatgcggcggttattacctacagcgcgtcagtggcaagatagtcaactcacaatcaataccgatagtgaagttgatccccaggcacttgctgcgcaacttggtgaaatgggttatttccgagataagttggttggtaaacctggtgagttcgcaatgcggggggatattattgacatttttccactggatgcggaaaatccggtccggattgaactctttgatactgaagtggattcactgcgttcttttgaagcagatacgcaacggagtattgagaatttagatagtgttcaaattatgccggcgactgacttattggccaacacagcacaattggaaatggctggtgaggcattacaagcagcttatgaggcggttgcggccaaaataacggataaaactgaacaaaaacaattggcgacaaactttgaaacaccgattgaacggttgttggccggtgaacgcgttgagaatttagcgttgtttgttgattatctgtatccagatcaatcaagtctgattgattactttaaaaagagtggcttagtgatttttgatgactatccgcgcattttagaaacgcagcggattttgactgaagaagcggccaactggcaaaccgatatgttggaaacccaccgcatgttgccagaccaacgactcatgatggatgcccaagcgctcatcaaaaaagatacacatgcgcatctctatctatcactgttccaaaagggaatggggaagttaaaactcgatgcactcaacaatttacccacgcggacggtgcaacaattctttagccaaatgccgcttttgaaaaccgagattgcgcattggcaaaagcaaaaacaaacggtcattgtgctcgtgtctgatcctaaacgggtcaagaagattgatcagacgttccacgactttgaaattgatgccgtcatcgccaataagactcagttggagacggggcggacacaaatcattcaagggtcacttcaaaatggctttgaattaccggatttaaaactggtggtcttaactgaaaaggaactgttcaatacggcgccgaagaaaaaagtccggcggcaaaccttggccaatgcagaacggttaaagagttataacgaattaaaaccaggtgattacgtggtccacgtcaatcatgggattggcgaatacgtcggcatggaaaccttggaagtcgatggggttcatcaagactacatcaccatcttgtatcgggataatgggaagttatttatcccagtcactcaactcaatatggtgcaaaaatacgtctctgccgaggccaaaacaccgaagattaataagcttggcggtggcgagtggcaaaagactaagagtaaagtttcggcaaagattgaagatatcgccgatgatttaatcgaactttatgcgcaacgggaggctgaaaagggatttgcctttccaaaagatgatcaattacaggctgaatttgaaggccagttcccctatcctgaaacagatgatcaattacgcagtaccgctgaaatcaagcatgatatggaacgcgtccgtccaatggatcgattattagtcggcgacgttggctttgggaaaacggaagtcgctttgcgggcggcttttaaggctgttgaagccggtaaacaggtggcctttttagtgccaacaacgattctggcgcaacaacattatgaaaacatgctgacacgcttcgcggattttgcggtcgaaattggtttactgtcacggtttaaaacgcgcaaagaagtgacggcaacgctcaaaggcttagcagagggcaaagtcgacatcgtgattggcacccaccgcttgttatcgcaagacatcaagtttaaagatcttggcttgttgattgtcgatgaagagcaacgctttggtgtaaaacacaaagaacgacttaagcagttgaaggcacaagttgacgtgttaacgttgacggcaacgccgattccacggacgttacacatgtcgatgctcggtgtgcgtgatttatctgtgattgaaacgccaccgactaaccgctatcctatccaaacgtatgtcatggaacaaaatgccggtgcgatgcgcgaagcgattgaacgggaattagaacggaatggtcaagtgttttacctccataatcgagtgagtgacattgaacgcacggtcgatgagattcaagcgctggttcctgaagcaacggttgggttcgcacatggtcagatgaccgaggcacaactagaaggtgtcatctacgactttgtccaaggtaaatacgacgtcttggtgacaaccacgattattgaaaccggggttgacatgcctaacgtcaatacgatgattgttgaagatgctgatcattacggtctttcacagctctatcaattacgcggccggattggacgtagtagccggattgcttacggttactttatgtataaacccgataaggttttaacggaagttagtgagaaacgacttcaggccatcaaggactttaccgaattagggtccgggtttaaaattgcgatgcgtgatttatcgattcggggagctggtaatttattaggtaagcaacaacatggttttatcgattctgttgggtttgacctatactcgcaaatgttgggtgaggccgtcgctaagaaacaagggaagcaagtcgttgctaaaacgaatgccgaaattgatcttaaactggaagcttacttaccagacgcgtatattaatgatcaacgccaaaaaattgaaatttataaacggattcgccagatggattcagaagcggcctttgatgaaattcaggccgatttaattgaccggttcggtgattatccagatcaagtcgctaatttattagcgattggtcagttgaagatgaatgcagatgacgcgttaatcgaaaccatcaaacaaacgaaagaaatcattcaagtcaccttatcggcgaagggcagtcgccttgtttcaggtgaacaaatttttgaatcgttatcgacaacccgcttgaaagcaacggtcgggtttgaacaagaacaattaagcgtgaaactcgtaatccagccgaagatgcaaccggcagattggttgagtgaagtggcaacttttgttacaagtctcttgaagatagaacaaaagcacacggaacaaccaacggattaggcacgctaagtggaggccaggcatgcaaaataaacagatgcaacatctgatgaaaggcgcggtcattttatcaattgcgtcgtttatcgcgaaggtattaagtgccgtttatcggattccatttcaaaatatggtcggtaacaccggcttttacgtgtatcaacaagtctatccaatctatggcattggcatgacgtttgcacttagtggctttccagtttatatttcgaaactggttgctgaacaagtcaatccggaggaacaaacgcagctgttaagacgctcatttgcactgttaggcatctttggtgctgcaatcttcatttatttacagtatcaagcgccgaaaattgcgggggcgatggcggatccagcattaacaccgctgattgaaatggtatcgtttatgtttttattgatgccgtttctagcggtgacgcgggggtacttccaaggaattttcaatatggtaccgacggcggtttcacaagttgctgagcaactcgtgcgggtcgtggtcatcttggcggcagcgtggctatctttgaaactgcactggtcagtgtatgaaatgggcacatgggcgatatcaggcgccttctttggcggcttggttgcaacctatattttattacggccagcagaaaccgcctttcaactcaaggcgccacaccgtggtggcatcgattttaaggcgtatcaacaattggcaaaacgcttagcgattgaaggcgggtcaatttgcctctttgcttcattaattgtgttattacagctggttgattccttcacagttaaaaaagggttggtcctcagtggattatcggaagaacttgctaagaatatgaaggggatttttgaccgtgggcaaccacttgtccagctgggattagtcgtgtcacttgccttctcatcaacgttgattccgagtctgtcacaagcgcggcaacggcggcaacaatatcaatttcaacaagttgctgaagcgctgattcatatcagtttaggtttatcggcagcagcaaccaccggcctaatggttttgatgccacagattaattatttcttattcggggatgctgatggtaatcaggcattggtttggtatatgttgagtatcgcaatcatcgcgctgatcaatgcttgcaactcggtgctccaaagtcttgatcagttccataaaacaacggcagccttaattgttgggttaatcgttaaagtagcaatcaatcaatggcttgtgcaacactatcaaattgttggcgcgagtgtcgggactgttatcagcctcggtgttgtgttagccttaattttacggcaatcaccagtgattgtacgtcaagcgcttggtttgcaacgctttaccggtaagttacttgcgatttgtgcagtgatgtggctgggtgttaagattgcgctacagtttgcaccacaatcacttagttccagaggacatgcgattttagggacgggccttggcgtactcgttggtgtgctcctatttggcggattagcattacggtggcaattattctcgattcgagaatggctgacgatgccaggtggccggcaactattgcgcctttcgaaaaaaataaaaggtaggacaaaataatgcgcttagataaatttttgaaagtatcacgaatcattaaacgacgttcagttgcgaaagaaattgcagacaagggtcgaatcatgattaatgatcgccctgcaaaatcttcaagcaatgtcatcgtgggtgataaactggagatcggatttggtaataaaacgatggtcgtacgcattacacagatcatcgaaactacgaagaaaagcgatgcagctgaaatgtatgaaattttggaaacaagacaagctgaaaactttgattaaggaaaaagcgctggccgaattaatatgggccggtgcttttttttgtgactttgttgagcatcttaataaaagtcattaagaatctgggatcttagttgacgacctttttgtgaaattgctataatgaacttaattccgagatggggggcttctaagtgagtcgaaaaattgcgaaaatcgagaatgcatttacccagcaacaagcagcccagaaaatcgtgcaagacaaggcagcccatgttaagcgtgttcataaacgccgcttatgtggcttggggattgttgcagtattagtcgtcttaatttgtggtgtgcagattttccaaacccatcattcattggccgagattagagaaacaacggcagctaaagaaaagacattaaaaaaagctaaagcaactgaatctgatttaaagattcaagtgcaacagctgcatgataatgattacttggccaaatacattcggtacaagtattactattctaaagacggtgaaaccatcttcagtttgccccaggacaaggcgcctaatttaaattagcaacaaaaataattcagaatacgaccttgtttcaagggcaaagcgtgctatacttattttattaaatatcacgcttaagtgattaaaagtttgacgagttcaaacgaccatttaggaggacgtagttttatatggcagttgaagttggttcaaaagttgctggtaaagtaacgggcattacgaattttggtgcttttgtagatttaggtgaaggcaaaaccgggttggtacatattagtgaagtgtccgatagttatatcaaagatattcatgatgttttaaccgttggtgatgaagtcacggtgaaggttatgtcagatcaaaacggtaagattggtttatcaatccgcaaagccgttgatcaacctaaagtgcaagaacatccgcgccctcaaagtcgtccaaataataatcgcggtggatatcgcaaaccagagcattcaagcgcacctaaaaaagaaggctttgatgatttattatcagggttcttaaaagatagtgaagatcgcttatcaacgattaaacggaatacagaaggtaaacgtggtggccgtggcggccgtcgcagttaatagaacaaattgataaaggttggcttgaaagtttagtgatagactttcggggcaacctttatttcatttcaagtctgtgttggagaggaatcggtatgttagaacaagcatttcaaacacatcttcaaaaagagcagttctggcaagccggcgacaaggttgtggtggcaacgtcaacgggagtcgattcaatggttttattgtggttattgactcatctgccccaaaaacaacgaccccaagtcgttgtggctcacgttaatcatgaattgcgtgcgcaaagtacggctgaagaaaaatatttaacccagttttgccgattgcatgccatcccgttacgcattcaacattggccaaaagcgagtcatcctgaaacaggggttgaagcggcggcacgtcaatttcgctatgctttttttgatcaagtcatgcgaaccgaatcggcgcattacttggtgaccgcgcatcacggcgacgatcaactagaaaccttgctcatgaaattagttcgtagcggtgaattgcatgaaatgcgggggattcggcaagtcagaccgtttaaaacggggacgttaattcgcccgctattaccttttagtaagcaacaactgcgtgattacgctgatcagattggtttgaggtattacgaagatcaaaccaatcaggaacaaactgttcttcgtaatcggatgcgacatgcggtggtgccacttttaaaacgagaaaatccacacttgattcaaaatgccaatcggttcagtcaaagtctgacccaaatggtggcacaccaagatgatctaaccgcggcgttactgccattgttggcaatcaaaaaacagccggcggcaattgaagggcgtttagaccaactcgatggcttgaaccagacacaacaaagggcgctctggcaattggtgtggcaacgatatttcaagactttaccggcgttaaaggcagcccagttaatgcaagtgcaacaattgttggcgaacccgcagaaaccgcaaggccaagtggcattgaacaatggcatcatttttgaaaagcagtatcggtgttttcggattggtgtccaccaaatagtggattctttggtcaaaacacgaacattagcgattaatgaatggctgcggttaaaaaatggcgaacaaattggtgttttcgatatcgaccatctacctaatcaagttcaacggcaacaggtcgtttggttagcaccagaggaatggccactgcaactcagggcgctacaagcaacagatcgaataatgcttgataaggcacaccacaaaaccattcaacggttatggattgatactaaaaccccacaggcaaagcgccaaaatgcatgggcggtttggaccccaaatcaattgcttggccggccggatttacggatttcggcgttgtttaatcgcgaacaaactggtaaaatacggtacatactatgttatttagatgattaagcaaattacggaggctggcacaatgttagaaaaagatattgaacgcgtattatattcaagagaagacattcaaaaggttaatcagcgcttaggaaaacaaattacagcggattatcaaggtaaaaacccgttattaattggtattttaaagggtgcgatcgtcttcatgacagatttgattcgcgaaattgacctccatgttgaaatcgactttatggatgtgtcaagttatggtgctgagaccatctcgtcaggtgaagttaaaatcatcaaagatttagatacgagtgttaaaggccgcgacattatcattatcgaagatattgtagatactgggcgcacgttgaattacttaatggcaattcttaaaacacgtcaagcaaactcaattaaagtctgcacgttaatggacaaaccaagccgccgaattgtgccagttcattcggattatgttgggatggaagtcccaaatgaattcgttgtggggtacggattggactatgccgaacgatacagaaatatgggaacaattggcgttttgaaacctgaaatttattcgggtaaataaatggtcaataaaagtcagatatgttatagtttaacagtgtcaaaaggacactgtgtcacaaatgatgagaagcttcaggaggtcacgtatgaacaacaaaaagaatggactgtttagtaatagtctgttttacattattatcttagtggctttagtcggtgtgttctcgttcttcatgaacggtaacgctggatcagagtctaaggaagttcaatcaagtacatttttaagtgaattgaagaccaataaggtcaagtcattctcaattcaaccaacgaatggtatttataaaatttctggagaatatcgtaaagcacaaaaaacagaacagcctaaaaagaatcttttaggacaaaaaacaaaagcaagatcagttaaacacttcacaacaaccttattacaaagtgattcacaagttggggcaatgaccaagttagctgacaaatcagcaaccaaggttgaaacccttcaagaaccacaatctggttggtgggtaagtattttaagtcttgtattgccattgatcatcatgtttggtttattctacatgatgatgggccaagcgggtcaaggtggcggtcaaggcggtcggatgatgaactttggtaagtccaaagctcaaaaagccgacaagaaagctaataaagtacgtttctctgatgtcgctggtgcggaagaagaaaaacaagaattagtcgaagttgttgaattcttaaaagatccacggaaatttgctgcattaggggctagaattccagcgggtgttcttttagaaggacctccaggtactggtaaaaccttattagctaaagccgttgccggagaagcaggtgtgccattcttctcaatctctggttctgacttcgttgaaatgtttgtcggtgtcggtgcaagccgtgtccgtgatttattcgaacaagccaaaaaagcagccccatcaattatctttattgatgaaattgatgctgttggtcgccaacgtggtgccggcatgggcggtgggcacgatgaacgtgaacaaacattgaaccaaatgttagttgaaatggatgggtttacggggaacgaaggcgtcatcgtcatcgctgctactaaccgttcagatgtcttagatccagcgcttttacgtccaggtcgttttgaccggaagatcctagttggtcgtccagatgttaagggccgtgaagccatcttgaaagtccatgctaagaacaaacctttagccgatgatgttgatttgaaagaaattgcgcaacaaaccccagggttcgttggtgctgatcttgaaaacttattgaacgaagctgctctagtagccgctcgtcgtagcaagaccgatatcgatgcttctgatgttgatgaagctgaagatcgtgtgattgcgggtcctgctaagcgggatcgcgtgattaatcctaaagaacgtgaaaccgtggcttaccacgaagctggtcatgcgatcattggtttagttcttagtgattctcgtgttgttcggaaggtaacaattgtccctcgtggccgtgctggcggatatgccatcatgttaccgaagaatgatcagttcttaatgagtaagaaagaattaacagaacaaattgttgggttacttggtggtcggacagctgaagaaattattttcaactctcaatcaactggtgcttctaacgatttcgaacaagcaacggatattgcccgcgggatggttactcaatatgggatgactgataagctcgggacagtggcccttgaaaaagaaggtcaaccattcgttggggcagcttacggtcaaggcccagccttctccgaaacaactgcggctgcaattgatagtgaaattcgtcggattattgacgaagcacatcaacaagcacacgaaattattgaagcgcaccgtgaacaacataagttaattgcggaaatgctcttgaagtacgaaacattaaacgaaaaagaaatcttgagcttgttcaatgatggtaagatgccagaaaagaacgctgaagaattcccaagcgaaaaagcagctacttttgaagaagctaagaaggcgcttgaagcaaaagaagccgcaaaagaagattcagaaaaagaaactgataaaaaggatgtgacaatcacacctgatgaagatgatcaatcgacaccagctgaggataatcaacatccagacgatgaagcataaattgttacaccaaaaaggtcgacacgattagtggtcgacctttttgcatcaatccataaaagaggttatttagatgacagattatttaattaaacaaatttcagaagatggccaacttcgtgcttatgcagtgaacgcaactgatgttgtaacggatgcgcaagaaaaacatgacacatggtcaacttcatcagcagcgtttgggcggacgattgtcggcacccttttattgagtgccgctggcttaaaaggtgatacgaagatgacagtcagagttgaaggtgacggcccagtcgggaagattgttgtcgatgggaatgcgcaaggcacagttaaagggtatgtgacgaatccacacgttaacctaccattgaacgacaaaaataaaattgacgttaaaggtggcgttgggacaactggtacgttgagtgtcacgaaagatcttggcttaaaagaaccgtttaccggtcaagtaccattggtatcaggagaattaggtgaagactttacttactaccttgctaaatcagaacaaacaccatctgcagttggcgtttcagtcttcgttaatgaagataactcaatcggtgtcgctgggggcttcatgattcaaattctcccaggggcggatgaccggttaatcgatatcttagaagcgcggctgaaagaaatgccgctggtgtctgaattactccaacaagggatgagcccagaggaaattatcactgaaattgtgggcgaactcccaatgaagacgttagaaaaaatgcctgttaaatacgaatgtgattgttcaaaggatcggtttgcaaaggcactcagttctgttgcgccagcggatttacaacaattaatcgatgaagaccacggtgcagaagcagtttgtcgtttctgtggcaagcaatatcaatttacagaagcagaactaaaggcaattttagccgcgcaatagaatagtcgcaaatttttgcctgaatactatttttttgctatgataatttggatattatcggaagacacgaagggaatgggttggcattatgacatggcaaataggagacgtgacgattccaaatcaagtagtcgtcgcaccaatggctggtattacaaacgcagcatttcgcgtaactgcaaaggaatttggcgcaggtttagtggtctgtgaaatgatcagtgatcgcggaattatgcacaataatcaaaagacaatggggatgatgtttgttgatccgaacgaacatccagttagcatccaaatttttggtggttcaaaagacaccttagtggaagccgctaaatttgtggatcaacatacacaagctgatattattgatatcaacatgggttgtccagtgaataaagtcgttaagacagatgctggcgcgcgttggttattagatccaaacaaggtttatgaaatggtctcatacgtgacagacgccgtgaagaagccagtaacggttaagatgcggacaggctgggatgaagatcatattttcgctgttgaaaatgcacttgctgccgaacgtgctggtgcttcagcacttgcaatgcacggtcggacacggaaacaaatgtacaccgggcaagcagactgggacattttaaaacaggttaaatctgaattaacgattccatttatgggtaacggtgatgtccggacaccacaagatgctaaacgtatgctagacgaagtgggtgctgatgctgtcatgattggccgggctgcgctcggtaatccatggattttaagccaagtggaaacctacttacgaacaggtgaattgattgctgaaccaaccccatgggaaaaaattgcaacggccaagttacaattacaccgtttagtcgaacttaaaggtgaaaatgtggcttgtcgtgaattcagacaacaagctgcctattacttgaaagggattcctcgtgcggctaagaccaaagcggcggttaacgaagtggaaacggaacaagccgttggcgatattttagaccgctttgtagaagaaaccgaagcgagaatggcaaattaggttccttatgttggtgttttcgtgttaaaatcaacattagtagataattgaatgtatggaggaattgtcagttgggacaaaaagataatcaaagagaaatgaacgaccaactaaaggtccggcgtgaaaagttacaattgttaaaagatgaaggaattgatccttttggtagtcgttttgatagaacacatatggctgcggaattacacagtgaattcgaagcaattgaaaaagacgatttagatgctaagaatctagaagtcacaattgcagggcggatgatgtctaaacgggggaaagggaaagttggctttgctgacatccgtgaccgttcaggtaaaatccaaatttacgtgcgtaaagatgaagttggcgaagaaaactatttaattttcaaaaaggctgacttaggtgatcatttagggattactgggcaaattatgaagactgacatgggtgagttaactgttaaagcaacgcacctgactttcctatcaaaagcattacgaccattgccagataagttccatggtttaaccaacgtggaacaaatctatcgtcaacgttacttagatttaatcgcaaatccagagagcttggatcggttcacgaaacgcagcaagattatttctgctgtccgtgaatatttagataacaatggctttactgaagttgaaacacctgtcttgcatggtcaagctggtggtgcatcagcacgaccatttattacccatcacaatgcgctagacatcaacttgtacttgcggattgcgcttgaacttcatttgaaacgattaatcgttggtgggatggaacgtgtctatgaaattggccgcgtattccggaatgaagggattgatacgaaacacaatcctgaatttacgatgctagaaacatatgctgcatactttgattataaagacgttatggatgaaacagaagggatcatccgatttgcagcgcacaaggttttaggaactggtcagatttcatatcaaggacaagcgattgatcttgatggtgattttgcacgagttcacatggtcgatgcaattaaggaaaagacgggtgtcgatttctggcaaccaatgacggttgaagcagcgcgtgaattagctgatcaacaccacgtgaagtatgaatcatactggcaagtggggcacatcattaatgcgttctttgaagaattcgtggaagatacattggtacaaccaaccttcatctatggtcatccagttgaaatctcaccattggctaagaagaatgctgaagatgatcgtttcacagaccgttgggaattatttatgcacggtaacgaatatgcaaatgcctttactgaattaaacgaccctatcgatcaacgtgaacgttttgaagcacaagctaaagaacgtgaaaatgggaacgatgaagccgaaggaatcgatgaagattacatcgaagcattggaatacggaatgccaccgactggcggacttggaattgggattgatcggttagtcatgttactgacagatgccgcatcaattcgggatgtcttattattcccaacaatgcgtccagacaacaataataacgattaagattaaactaaagcccgcaagcagacgatttgcttgcgggctttttttattgaaaaaaattgggattataaaaagtttttttagtgtattttgtgggtgaataagcatcaactttcggtatattatgttgtttgcgcgagttgttcgtttaatagttcatttatttgcataaattgcggatactagcgactgtttagattatgaaagttcataaataacagttgagattaatagttgacgaaaggctgtagagctgatatagtagtctatgttgtcagcgagataaaacattgttgataacgagtcaggtaattaaatcagtttgaatatttattcaaaaaacatttaccatttgttgcggcctttttttgtgcgattagcaacggtcgcgcataatgacgcgcgtcactttctttgttagaatagagctagtcactttacgaatgtaggaggaacaacatgggttctcaaaaaaaattattattagtcgacggcaatagtgttgcatttcgtgctttttttgcaatgcaccaagctttagaccatttcaccaatcaggcaggactgcacactaatgcgatttatgctttcaagaatatgttggatattattctgaaaaagattgaaccaacacacgtgttagttgcttttgatgcgggcaaaaccacttttagaaccgaacaatttgccgactacaaagggggccgttcaaaaacgccacctgaattaacggaacaatttccttatatcagagaactcttaacagcatatggtattcagtcttatgaactcgctaatttcgaagcggacgatatcattggtacacttgctaaacaagcagaagctgatggtttcacggtcgatatcgtcactggtgatcgcgatttaactcaattgacgactagtcagacaaccgttaacatcactgttaaaggggtcaatgaaattgaagcgtatacccctgaacacgttcaagaaaaactcggtttagaaccaagccaaattatcgatttaaaaggattgatgggcgatacctctgataattatcccggggtgacaaaggtcggggaaaagactgcgcttaaattgattacggaatttggaaacattgaaggtgtctatgaacatgtcgatgaaatgaaaaagagtaaattgaaagaacatttgattgaagatcgcgacctagctttcacgagtaagacactggcaaccattaaacgtgacgcgccaattacgattggcttagacgatgtggtgtacaacggacctgatatggcagctttggttgctttttaccaagaaatgaacttcaagtcgtttctaaatcaattagatgttgcaccagttgaacccacggctactgaagactatcaatttacagtattaacccttgataacatcgccgatgtcgtgacaaccactgaaaacgttgcgtttggcatcgaaatgttaaccgataattaccatacagcagacttgattggcttttacattggccgaccagaccactggtatgtcagcgacgacgtaacactcttgacagaatcggttttaaaaacgtggttagaagatgctaaacgtccgaaagcagtttttgacgtgaaacgcaatcaggttgcggtgaatcgcttagggattcacttagcgggggttcaatttgacttactattagcgtcttatttgttgaatacaacgaataacagtaatgatcttggaacggttgcaaatttacatcagtatcaaaatgtccaaacagatgaagctgtttatggcaagggggctaaacgcgcagttcctgtcgatccaaccgtgctttatcaacatctgattcaaaaagcagcagctatttacaaattagcaccacaattgacagaacaattaaaaaaacatcaacaattcgatttattcacggatatggaattgccattagcgctagttttagcggatatggaaatcaccgggattcgagttgatgcaagtcgcctacaacaaatggggggcgagttcagtcaaacgctgaagattttggaagaaaagatttatgcggaagctggcgaaacgtttaacatcaattcgcctaagcaactgggcgtcattctattcgaaaagatggggttaccagtgattaagaagaccaagaccggctattcaacggcggtggatgtcttggaacaacttaaaaaagacgcaccaattgtccaaaccatcttggattatcgccaaatcgctaagattcagtcaacgtatgtcgaaggattattgaagtcaattcatcaagataataaggtgcatacgcgttacttgcaaaccttaacgcagactggtcgcttgtcatcggttgatcccaacttacaaaatattccagtccgtctagcggaaggccgtaagattcgccaagcgtttgttccaagtcaaccgggttggcagatgtttgcttctgattactcccaaattgaattacgagttttagcccacatttcgggggatgccaatatgcaagaggcattcaaggaagaccgcgatatccatgcgaatactgcgatgaagatttttggcttatcgagcgctgatgaagtgacaccagatatgcggcgccaagcgaaagcaactaatttcgggattgtttacgggattagtgactatggcttatcacaaaatattgggatcacaagggctgaagctaaacgctttattgaagcgtattttgaacagtatccaggtgttcatcaattcatgcaagatatcgtgaagaaggcgcgcgaagaaggctacgttgaaacgctcttccatcggcgtcgctatttaccagatattcacgctaaaaacttcaatttgcgctcatttgcagaacgcacggcaatgaataccccaattcaagggagtgccgctgatattattaagatggcaatgatcttgatgcaagcggaactgaagaaggcaggattacaagccaagatgcttttacaagtacatgatgaattgatttttgaagcaccagaatcagaaataccaatgttagaaaaattagtaccaagtgtcatggattctgcggtttcattagcggtgccgctgaaagttgaaagtggctttggaccaacttggtacgatattaagaaataaggggacacacaatgccagaattaccagaagttgaaaatgtgcgccgcggattggaacaattagtggtcggtaagacggttcaagcaattgagattcgctggtcgaaaattatcagtaatccagacgatgtttttgttgaaggtcttgttggacgccaaattatcggtgttgatcgacgcggtaagtatttattgattcgtttcgatcaaaacttaactgttgtgagtcatttgcggatggaaggcaaatacgaagttgatgatcaatccgtaccaatgactaagcacacgcatgtgatttggacatttacagatggacaacagttacgttatcttgattcacgtaagtttggccgaatgttattaattgaaacgggtcaagaaaacactgtttctggattgaaggacttaggggttgaaccaaccccaacaacgtttaagaaaaccgccttctatcaggcgttacagaaacataaaaaagcgattaaaccactgttgctggatcaaaaaattgtaacgggtcttgggaatatctatgtggacgaaacgttgtggttgagccagattcacccagaaacaccggcgaatttattgacgaaagctgaaacagatcgtttgcatgatgaaatcatcacagagttagaactggcaaccaataacggtgggacaacagtcaatacgttcttaaacgcggcgggtcacgctggggcctttcaggatatgttgcacgtctatggtaagaaagggcaaccgtgtgatcggtgccagactccgattgagaaaattaaagtagcacagcgtggcacgcatttctgtccgcggtgtcagattaagagagaagcggttcaatgacgtattttctaggtttaacgggtggcattgccagtgggaagtcgactgttgcggcattgtttaaagaacagggaatcccggtgattgatgctgatcaagttgctcatcaggtattagcgactaataaatcggtacaggcacaattgcaagcagcctttggcgaagcagttgtcaaaaatggtcaagttgatcggcctatgttgggccagcaagtcttcggtaacccagaggctttgactcagttaaatgcgattactgggcccgctattttgacagccattaaacaacagatgcaagcagcagatgcaccgctggttgtgttggatgtgccactgttatatgaacaacactacgagcaatattgcgatggtgttgcagttgtctacgttgaacgtaaaacacaattgcaacgtttgatggcgcgtaaccaattgactatagaacaggcaaatgcgcgaattgatagtcaaagtgatttggcgaccaaaaaagcgcgagcggatttcgtgattgataatcaaggcacacctgcaatgttgcggcaacgtgttttggcgttgttacaacagttgtgtcataacaagtaatacaagcggtcgaacagattattctgttcgaccgcttttttgtttggaaaaggcgaaatgccttgagactgatacattttttgtttagcctgcttgcctggcatgttatactactgttatactaattgttttaaaattggattgaatttgaaacgaattaatcaaaagataagaaggtgtcattatgctatgtccacattgtcatcagaatagttcgcgggtaattgatagtcgtcccacggatgaagggcgagtgattcgtcgtcgccgtgagtgtgagaattgtcgtttccggtttacaacgttcgaacgagtggaacaaaccccattgttggtaatcaagaaaaacggaacgcgcgaagaattcaaccgtgataaattattgcgcgggctaattcgtgctgctgaaaaacgccccgttacaatggagcaaatgactgaagtagttgatgaagttgagaataagattcgctcattgggtgaaaacgaagtctcttcacaagccgtcggagaatacgtgatgcgcttgttaccagatattgatcagattgcctacattcgctttgccagtgtttatcgcgaattcaaggatatgaatgtctttatgagtgaattacaagaaatgatgaataaagaaaagacgaagaaatcgaattaaggaagaggggttagccgatgtcagatgcatttgattttttgagtccaaaagacggcttttcagtgacaaaagctaactatttgaccgatttcgatcaaacagtcgtcacttacttatatcaaccattgatgggggctgttgcttacagtctctatcttttgttatggagtcaaaccaagaaagaaacggaacaacattttcaaacacatgcgactttgttaaatctgttgagtgttgatttacctgctttttatgacagccgcagcaaattggaagcacttggtttaatgcggacgtatcaaaaaaatgagggaactggccgcaagttggtgtatgaactgtatgcgccattgcaaccacaagctttttttaacgatgatttgttaagtgtggcattgttcgaagcggtccgcgaaacacggtttgtggaactccgtgactatttcaagctacgaccggtttacgccaaggattatcaagaggtcactaagaatttcttgaccgttttccatgtgcaaaacgatttattgacgaacgtgccaagcagtgtggctgaaactaaggcaatgtatcaacaaaaagcagctagcacaccgcagtttacctcggttgagttgcggacttttgattgggacctattacaagatgcaacggcgcaataccagattgatacggatcaaattctcaaaaatgaacagggcttgtttaatctccattatttctatggtctagatgagatggacttagcgcgtttgattggcttgacgatgaatgttgctgacagtacgattaatatggcagcgctcgaacagaacgtcttgaacaattacacacgacgtcagagtaaccggcaaacgccagctgctacaacaacgcaaaaaccgttagccgagttacaaaaagaatggcaaaaagccggctttaacgaacaggaattgcagtggctaacagaaagtcagggctacttgccagttgattatctcgaatacttgaaacaaaagaaccacggctttgtcgctaaaaatgaaatccgggcgttaaaggacttgcaaaaccgctatatctttaacaatgatgtgctcaatattttggtcgtttatatcattacgcaatatgatgggctcactcaggcgctagtcgatcggattgcgaaccagtgggctcaacaaggggttaagacggcagcggatgcgattttgcagattcgcgatttccaaaccaaacagacggcaaaggtgcaaaacaatcgccaaacgcgttatcagaacaaaactaaaaaagaaccagtacctaaatgggctaaaccagattatcaagcgccaaaagaaacaaccacacctgagcatcagcatgaactagaagtggcgttgaaaaaaattcgtgaggggcgggaatcgtaatggaaaatatgggtaaagatttgacggattacatgaatcggcaaaagttaaaccaacagtttaataaattggtcgaagatgccttgaacgattccgatgtccaagcatttatacaagctaacaaagaccgcttatcacaagaaacggtcacgcgtagtgccgctaaaatttacgaatacgtcatcgaaaagaagaagttagctaatgggcaaaccactttggcaccgggttatgcgccaaagttagtcttaaataaccattttatcgatgtcagttatgagcctacggcaagtttattacaagagcgcgaacaagctgccttgcatgcacgagtgaagtcaattaatatgccgcgcgatattgaacaggccaagattgattcatacgatccaaccaatcggtttgacgcattgatcaaagctaccgcgtttatcggggcttatcggcaagcaccccatgattttcaccaagccttgtaccttagcgggcaattcggggttggcaagacttacttgttaggtgcgattgccaacgaactggcgttatccgggtttgaaaccacgttgattcatttcccgacatttgcagtggagatgaagaatgcaattgggcaaaacaatgtgttagaaaaggttaacgtgataaaaaaagcaccgattctgatgattgatgatatcggtgctgatgcaatgagtgcgtgggttcgggatgaagtacttggcattattttgcaatatcgaatgcaagaacaactcgccaccttcttcagttcaaacttcacaatgactgaattagagacgcatttgacaactagcaaccaaggagacgaaccggttaaagcggcccgcatcatgcaacgtgtgcgctatttagcgcaagaaattgaagttggtggtcaaaatcgccgcttacaaccttagtaatttaggcttgctaaaaaagcaattaagtgttttaatagaatcaatcaatgatgaaagacaccttttaaatgaaccatcgcagagagaaaaacatagctgaaagtttttcacccccatttaattgaccactttcaaaggcaatacaactgatcgggtcgtttccgttatagacgcttaaagttggagaaccaaatgttggggtctcaatctgggtggaaccgcgaaattaattcgtccctgagctgcacaattcgtgcgtctcagggactttttttattgttgatgacaaattagaaggagtgaatagtaatggcagagattcaattaacttttccagatggtgcccaaaaggcatttgaacaagcaacaagtcttttagatgttgctaaatcaattagtacaagcttagctaaaaaggcaattgccggtaaattgaacggtgaattagttgatttacagcaaccaattttagaagatggggcaattgaaatcgtcactaaagacgacaaagcaaccgatttgatggcaatttggaatacggcagcctttgttttagctgcaacgttgaaccgtgcttatcccgagatgcaattcggcgaagtacatgcaactgaagatggcttcttctatgataccgaaaacgaagctggtcaagtagctgtgaccgacttaccagacattaaaaaagcaatgagcaagttaatccaagctggcggggcaatcgaacgtgtcagcttagacaaagctgctgctaaaacactatttgccgggcaaacttacaaattagcattattagatgaaatggaaacagaccaagtcttagtttacaaattaggcgattttgctgattttgggttagcaccaatgctagctaaagtgagcgacgttaaggtctttgaactcttatcggttgccggcgcttattggcaaggtaaatcaagtaataagatgttacaacggatttacggaacagcttacaacaaacaagctgacttagatgctgacttacagcgtcgtcaagaagctaaagaacgtgatcaccgtgtgattgggaaccaattagacttattctttgttgatcctaaggttggtgcgggcttgccttattggttgccaaatggtgctaccatccgacgttcaatcgaacggtacatcattgataaagaagttgccaatggttatgaacatgtttacacaccaattctagcgaacttagatttgtacaaacaatcaggtcactgggatcactaccgtgaggacatgttcccaccaatggatatgggcgatggcgaaatgcttgaattacgcccaatgaactgcccatcacatatccaagtttacaaacaccacccacgttcatatcgtgaattaccaattcggttagctgaactagggatgatgcaccgctatgaaaaatcaggtgcgctttcagggttacaacgggtgcgtgaaatgactttaaatgatggacatacattcgttcgtcctgaccaaattcaagatgaattcaagtcaattttgaaattaatgattgaagtgtactcagacttcaatatcaacgattatacattccgtttgagctaccgcgatcctgctaataccgaaaagtactatgctgatgatgaaatgtggaacaaagcacaaacgatgttaaaaggtgctatggatgatcttggtttagattacgttgaagctgaaggcgaagctgctttctacggtcctaagttggatgttcaaacgaagacagctatgggcaatgaagaaacactttcaacaatccaattagacttcatgttgccagaacggtttgaattacaatatgttggcgaagatggcgaaatgcaccgtccagttatgattcaccgtggtttagtatcaacgatggaacgtttcacagcttacttaacagaaatctacaagggcgctttcccaacatggttagcaccaactcaagctgtgattattcccgttaagaatgaattacattatgattatgcaaagaacgtcaaagatgcgatgatcaaacatggtttacgtgtgcgcattgatgatcgtaatgaaaagatgggttataagattcgtgaagcccaaacaagcaagattccttatacattagttgttggggatcaagaagttgctgacgcaacggtttctgtccgtaaatacggtgaagaaaacgctgctgaagaagcttcagacatgtttgtagatgcaatcgttgctgaagttggtaactacagtcgcgatggtaaagatcacaaaacaatcaacctataagcggttattaaaacgtccgaaatgttattttgacatttcggacgtttttttgtttttttaattgcgcacaactaaaaaagcggtataataaatatgtaaacgattccaatcgttgattaatgggaggcgttattatgacgacagaaaaatatcaagcaggttcagcagagcaaccattggacattattaacctctatgacttggaaaaagaagccggcgaagttgttcccaagggtggctttgggtatatttacagtggcgcgggtgatctttataccattaacgaaaacattacggcatttaatcacaaatacatcgcaccacgggttttacaagatatcgaaaatccagatacaactaccgaaatctttggcgatcacttaacatcaccaatcattatggcacctgttgcagctcataagttagtgaatactaaaggggaagcggcaaccgctaaaggtgtggctgattacggttcaatcttaaccatgagttcatttgcgtcagcaagtatcgatgatatggcaaccgcagcagatggcgcaccgcaatggttccaactctatatgagtaaggataacgatatcaatcgtaagattttagatgaagcgatggcgcataacgttaaagcgattgtcttaacagctgatgccacagttggtggtaaccgcgaaaccgataaacgcaatcattttacattcccagtcgggttaccaatcgttgaagcttaccaaacaggtgtgggccaaacaatggatgccgtctacaaatcagctaaacaacgtttgaaccctaaagatgttgaattcatttctgaatacacacatttaccagtctttgttaaagggattcaaacagcagaagacgttgaaattgcacttcaagccggtgctaaagggatttgggtatccaaccacggtggtcgtcaattagacggtggccctgcagcctttgattcattacacgtcgttgctaaggcagttaataaacgggtaccaatcgtctttgatagtggtgtgcgtcgtggccaacacgtctttaaagcattggctgaaggggcagacatcgttgcaatcgggcgcccagtcatttacggattagcacttggcggtgcacaaggggtacaaagtgtctttaactacttgcaaaaagaattagaattagtcatgcaattagctggtacacacaacattgacgaagtaaaagccacgcacttagtggacaatcattacggcaactaagtacacgtaaatttaaatgcgggatttccttgactttaaattcctaaccgagtatacttattttcgttgagaaataaagcagaagttcccgcttctcgccttagtagacacttgatgtctctgggctgatagtttctaattcggacgaactaagtaaccgaacaagcgggcctttctgttatgagagggccgctttttttattacttagctgcattttctctctaaactttatggaggtgaagagtcatagcaaaagatttgatggttaacgatggtattcgtgcacgagaattgcgtttgattgctcaagatggcgaacaacttggtattaagagtactcaagatgcaattgcattagctgatcaagctaatatggatgttgttttggtttcaccaaacgcaaaaccacccgttgctcgtattatggactatggtaagtaccgtttcgagcttcaaaagaaacaacgtgacgctcgtaagaagcagaaaaccattaacctcaaagaggttcgtcttagtcccacaattgaacaaaatgattttaatactaagttgaacaatgcacgtaagttccttggcaaaggcgataaagtgaaagcttctattcgtttcaaggggcgcgcaattacgcataaagaaattgggcaacgtgtattggaaagacttgctaaagaaacagaggacatcgctaaagttacagcacgtcctaaaatggatggccgtagcatgttcttaatgttagaaccgctaaaggaccaaaaataaaaaatctgtttctgatttattaggaggaaatatcatgccaaaatttaagacacaccgtgcttcagcaaaacgttttaaacgtacaggtaatggcggcctaaaacgcagccacgcctacacaagtcaccgtttccacggcaagactaagaaacaacgtcgtcaattaagaaaatctggaatggtttcaaatagcgatatgagacgtatccgtcaaatgttatcaggccttaaataagccatagcattttcggattcaagcaaaaattagatcagtacagcaacgctttgacgttgtttgttattcaaggaggaaattcttatgccacgtgttaaaggtggaacagtgacgcgcaaacgtcgtaaaaagattttaaaattagccaagggttatcgcggcgctaaacatttattattcaaatcagcaaatactcaagtaatggtttcataccgttatgcattccgtgatcgtcgtcaacgtaaacgtgacttccgtaagttatggattgctcgtatcaatgctgctgctcgtatgaacaacatctcatacagccaattaatgcacggtttaagagtcgctgaaatcgacatgaaccgtaagatgttagctgacttagctgttaacgatgctgctgcatttacatcagttgttgaagctgctaaagctgcattaaacaaataattaaagatcaaaaaaagagtctgggacaaaacttcgttttgttctagactctttcttttatcattataaaattagtggctaataacaatcttacctggggcatgatgactctcaaggagcttgtggccttcaataatgccttccaaagtaaatgggagcgtcttgaagacggtattgtgtagtaaaccttgatcgatcaattcatttaaatcttgtaaggcggttaaatctgcataatccttacgcggatagacagattggtaattgatgtcagcgcgttgttgatcgtctgttggtaagatggtcgttgaagtgaatgtgccacctggtgcaactaagttattgaggcgttcagttgattctggatcgcgacttaagttgataccgattttagcggtctgcgcaagtcgttcgaagtcagatggctgatcataagcaattacttcttggacaccgaatgagcgcagatagtctaggttagcactattggcaattgcaatcacgtttaaatgagctgctaagcttaattgaacgagtaaactaccaacggcaccactggcacccataatagcgagtgtatcgccgtgtttaaagtttgtgaagtgcatcagcgtattgtaagcagtgatgccggcactgggtaaaccggctgcttcagcgatactcatgctggctggcttacggagaatcttcgcagtactagccgttacgtattcgctataagcacccattgatcggtgattgatgacgatttcgccaacgcggtaatcatcgacgtcagcaccaagttcaacgatttcaccaaccacatctgtaccaggaaagattgggaagggtaatgggcgcactgaatcttgtgaaccattccgtagtgcaacatcgtatggattcaatccagcagcgagcactttaatgaggacttggttgtcctttggagttggttgaggctgatcgaaacgttcgaaaacgtcagggccgccaaagtgattaaaaccgaatttttccataacaaacacatcctctcaatttctttaaacgtaccagagttggggctaaaagtcgattagtttgacttatggatttaaatggattaggaattagttggaaattatggaaattaaccgcgtaaaggtgcaatttggtgtcaaataccctataattaatcagtgactagattaaaaagaagtgcgtcagtaggcggttatatttcgaggactagcctagtctggcgaatgaccaacttgttggtcgtttgacggacgtcgctagccgcaaaaatatgcctactgaggcacgttagaaaagaagtgcgtttaaacctggtatactccgagcactagcctaacaaggcgaatgattgctgcaagtaatcgtttgacttgtgtcgctaggcacaggaatatggtttgaaaagcacgttaaagaaaagaagtgcgtcatccacggttagcttccgagcatttgcctaacttagcgaattggcgctgcaagcgccgatttgataagtgtagcaaagcgcaagaagctgttgatgaaagcacattaaagtcgaggggacagtacatgctaaagaatttcaagccaacttggatggtcaatgccatctacgacttaacaccagaacaacttaaggcaaaagggattaaggccgttttaacggatttagataatacgttaattgcgtggaataaccccgatggcacaccacagttaaaagcttggttagcacagatgcaagctgccgaaatcaccgtgatggttgtttcaaataacaaccatgatcgcgtgcaacgcgcgctcagtgaattgcaattaccattcattgctcgggcgaacaagccattggcaactgggattaccaaagcgaagaagcagcttggcctttcgcgacatgaagtggtgatggtcggcgatcaattgattaccgatatgcatgccggtaatgtggctggcgtccggacgatattggtcaaacccattattgacagtgatgcctggaatacatcgattaatcgattctttgaaaaatatattatgcaacaactactaaaaaaacacgcagatttaacttggcgggaggatttaaatgactgaaacacaacaaactgaggaagaactattttgtattggctgtggcgctcgcatccaaacaacggacaaagaagcactcggctatacgcctaattcagcgcttaaaaaaggcttggaaacgggtcaattgtattgccaacgttgttttagattacgacactacaacgaaatcagtgatatcaaattaaatgatgatgatttcttagccttattgaaccaaattggcgacagtgacgcgttgatcgtgaacgtcgtcgatatcttcgattttaacgggagtttaattccagggttacatcgttttatcggcgataaccccgtgattttagtggggaataaggttgatatcttaccatctgctcttaacccaaataaagtgatcaattggattcaaaaagaagcgaaagaacatggcttacatccggttgaaacgatgttggtcagtgctaaaaaagggaattcagttgatgaattattggccgtgattgaacgcgaacgtaaaggccgcgatgtctatgttgttggggtgacgaacgttggtaaatcaacgttgattaaccgcattatcaagcaaactgggattttagatagcgacgtgattacgacgtcacaattcccaggaacgactttagatcgcatcgatattccattgtatgaagatgatcatgcattgattgatacaccagggattatgcatgcccaacaaatggcgcattatttacatgataaagacttacggttgattgcgccgcaaaagcggattaaaccaaaagtataccaattaaatgaacaacaaacattgttcttgggtgggttagctcgttttgatttcattcaaggtgcacggcatggctttgtcggttattttgacaacgaactttacattcaccggactaaacttgaaaatgcagatcaattctacgctaagcaattaggggacatgctacagccaccacatccagaagatttagctgattttccagaactccaacggtatgaattctcaacaaagcaaaagagtgatttagtgtttgctgggttaggctggattacgttaccagaaaatgtcgtggttgcgggatatgcgcctaaaggtgtctcagtcatgattcggaaagcattaatttaattagggaaggaagtatcgcacgtgttaacaggcaaacaaaaacattacttacgcggtttagcgcaaaccactaaaccactttttcaactaggcaaaaacggcttaagccaaacttatttcgaacaaattgaagaggccatcgaaaaacgagaactcgttaagattaacttgttacaaacaacagaagtgaccgttgatgaattagccaacttcttaaaacaacatgacagtcgcatcgaaattgcgcaaaaaattggacgcacattggtgatttataaagcttcacggaaagaaaaataccaaaagatttcaacgattgttactaagctcggacgctaataaggcggtgatcagatgcaaagtgcaacgctaaagcagacaaatcatgtgactgaaccggacgtgttggttgtagaagatggccatcgcttgcaagtcggcattatggggggcacatttaacccgccacacatcggtcatttagtgatggcagaacaagttcgtagccaactcggtctcgataaaattttgtttatgccagatgccaatccaccgcacgttgatgagaaaaaaacattaccagcaaaacaccgtgttgcaatggtagaacgtgccatcgctgataattcgcattttgaactcgatttaacggagattgaacgtggcggtgtcagttacacctacgatacgatcgtggcattaaaacaacaacaccctgaaatcgattattatttcatcattggcggtgatatggtcgactacttgcctacttggtatcgaattgatgatttagtgcagttagtccaatttgttggtgttaaacgaacagggtatgctcaacaaacgccgtatccagtcttatgggtggacgcaccggtaattgatgtcagttcaacgcaaattcgcaataagattcaacaaggctgttcagtgcggtacttgttaccggacccagtctttgaatacattcaaaaagagggcctctatcatgagtgattttgtttatcaagaaaacatcgtgccgtatacacgggctgagttagtggctaaagttgccgctaacttatctgaaagccgatttgaacattgtttgcgtgtggaagccaccgcgattcaattagcacaaaaaaatggcgcagatgttgaacgcgcggcaattgctggtttagtgcatgactatactaagcaattaccagatgaaacgttcattgaagtgattaaaacgcaaggctttgatccagaactactcaattacggtaatgccatctggcacggtgttgttggtgcttatttcattgaacgtgatttagaaatccatgatgaaacgattttaaatgctgtgcgtcgtcatacgattggtgcgccagaaatgaccttgattgatcagattttatttgtggcggattttgtcgaacctgggcgcaattttccgggcgcagaagctgctcgtgagacagcaatggctgatttagcagccggcgtgcggtatgaaatcttaaatacattgacctttttaattcagggcaagaagcagatttatccgaaaacaatcgacacatacaatgcttgggtaccgactcaagccaaataaaggagaactttagtgaaaagtttagatattttaaaaattgctgtgcaagcagctgatagcaaacgagcagaagacatcgtcgcaatgaacatggaaggcatcagtttattagctgattacttcgtgatgttaactgggacgtcagaacgtcaattaggcgcaattattgacgccattgaagacgcagaagaagaaaatggcgttttcgtaaaacacatcgaaggtaaaaagggttcacgttggatcttgatggactttggcgatatcgttgtcaatgccttcatgccagaagaacgtgccttatacaaccttgaaaaactttgggatcaagcaccacttgttgatgtttccgaatggttggatgaagaatgatttaccaaagctttgcaaccgtctatgaccgtttgatggaccattcattatatggtcaatggcgggattacacgttgcagacgttacaaaataaacatcgagtcctagaactagcttgtggggctggtgatttagccatcttgctaaaacaagcagggctagaggttgtcggcttagatttatcggccgagatgttgagtatcgcttctgaaaaggcttctgaagccgaggtcgagttacctttattacaaggcgacatgcttgacttaggcgaaattgggacgtttgaagcggtcacttgttttgacgactcgatctgttacatgccagatttagcgcatgtccaacaagtttttgaacaagtttatcgaactttagagccaggtggtcaatttctatttgatgcccattcactttatcaaatggatgagcttttcccaggttttatgtataacgataagacggcagaaacggccttcatgtggacgagttacgcaggtgaagtaccacattcagttgaacatgatctcagcttttttatctgggatgacgagattgacggttatcaagaacttaatgaattacaccatgaacgaacttatccggtggtagattatgttgcagcattagaagctgctgggttcaagaatgtatcagtcagtgctgattttggccaagaagccgttcaagaagatagtgtgcgttggttctttagcgcagtgaaataggcggagggcgcatgagaattacggggattattgcggaatataatccgctacataatggacatcggtatcaattgcaacaggcgcgggcagcttcgcacgcagatttagtgattgtctgcatgagcggtaactatgtgcaaagaggtgaacccgcgattttggacaaatggacgcgcgcacaacttgctttgagcaatggtgctgatatggtcgttgaattgccgtttgccagtgctgtccaacctgcagaccgttttgctgatggggccgtcaagttattggcggcgcttggttgtcagaccttagcgtttggcagtgaatatccaacgtttgactatcagcaagtcgggcaacagattttagctttaaaggccaagtcacagacgtttattgattatcaaaaaacttatgcgacgcagctcaatgagttttatcaagcagaattaaatttaaatttagatcaacccaatcacctcttaggggtcagttatgcggttgccaacgcgcaacttgaagtgccaatgcagttgcttgcgattaagcgtgagcaggcacaacacggcgatcaaacgattggcgcgggacaatttgctagtgccagtgctatccgacaggcggcaacaaagggtgatgactgggcacagttagccccagtgatgccgcattcgactttaacagcgctccagactcaatcgcatctggattgggaccaactatggccgctattgaaataccgaattgaaagtacaccccttgcccaacttcggcagatttatcagatgtcagagggcttggagtaccgtttcaaaaaggtgattcattcagtcaatcggtatgccgagttgttacaggcacttaaaacaaagcgatatacgtatgcacgcttgcaacgggtttgtttatacgtcctgttgaatattcaacaaacggatattgaacaatcattagcgcagcggcccatccatttgcttggctttaaccaagtcggccaggcgcatttgcacacgttgaaaaaaacgctcgatcaaccacttatcagtaaggtctcagctaaattgggtgccgaagagggcccactggggttagaggtgcgagttgatcgattacaagaacagtttggctggcaatcacagaattttgcccgccaaccgatttttaaccaaagaaaggatgacgagcattgttaaaatggacagtccaatcattattaaaacatcgtgatcatccattgatgtttaaagaaacattgatgttaaaagaaagtttacaaaaaagagaagctgatgtcctagatgctacaccatttgtagtagacggtgaattaacggttgaccagcgcgctgtaattgcacgcgtacatgtggtcgggacattaacagtgccttcaacgcggagtttagatccagtagccttgccaatggattttgaattcactgaaatctacgttgatccagaagacgagcagttgggacgatttacggacgaagatattttgttcccaatcgaaggcgaagccctagagctacaggtagctgttgaagatcacattctcttgcacattccaagtcacatcctaacaccagaagaagaacaagatgatgtgatgccagccggacagtcgtggtcagtcatttctgaagaagcctatgctaagcaacaggctgaagaagaaacggcacccaatcctgaatttgctaagcttaaacaattattagaagaacaaaacaatgacgccgactaagtttggcgtttttttatacccaatttgttaaatggaccggaccaaatcagttaaaatgcttttatttaaagcgtaattctgctaacataaacacagtagacgcgttgtcgttttgatagtcaacaacgcttaaatttagaaatcatttaggaggccttttacatgagtcaaccacaaatcggtgtcatcgggatggcagttatgggcaagaacttagcattaaacattgaaagtcgcggttacaccgttgcgatttataaccgaacaggtgctaagacagaagcagtgatgcaagatcacagcgaaaagaaattggtaccaagctatacaattgaagaatttgttcaatcattagaaaaaccacggcgaatcatcttaatggttaaagccggcgctggtacagatgctgtcatcaacgaattgttacctttattagataaaggtgatattttaatcgatggcgggaacaccttctttggcgatacaattcgtcggaatgctgaactagataagtcaggcattaactttatcggaatgggtgtttctggtggtgaattaggcgcattagaaggcccttcaatgatgccaggcggtcaaaaagaagcttatgaattagttgcaccaatcttagaacaaatgtcagcaaaggctgaagatggccaaccatgtgtcacatacatcgggccaaacggtgctggtcactatgttaagatggtccacaacgggatcgaatatggtgatatggaactcatctcagaaagttataatttattgagaaacgttgttagtttatctgttgaagaaatcgctgatgtcttcaaagaatggaaccacggcgaattagacagttatttaatggaaatcacagcggacatcttaacgcgaaaagatgatttagaaacggataaaccaattgtcgacgtcatcttagatgctgctggtaacaaaggaactggtaagtggagttcacaaagcgcccttgaattgggtgtgccacaatcattgattacagaatctgtttatgcacgttatatttcagcaatgaaagacgaacgggtggctgcaagcaagattttaccagccccaaccgttgctaaattaacagaagataaaaaagaattaatcgaaaagattcgccaagcattgtacttcagcaagatcatgagctatgcgcaaggctttgaacaaatgcgggttgcttcagatcaatatgactggtcattaaactatggcgaaatcgctaagatctggcgtgaaggctgtatcattcgggcccgtttcttacaaaagattacggatgcctttgataaaaaagctgatttaaacaacttattgttggatgattacttcttagatattacaaagaattatcaaggctctgttcgtgacgtagctgcaatggccatccaacaaggtgtgccagcacctggtttctcagctgctatcacatattttgattcatatcgttcagaagtattaccagcaaacttaatccaagcacaacgcgactactttggggcgcacacataccaaagaacagaccgcgaaggcacattccattatacttggtataaagaacaatagagtgcgcaagtagatggggatgcgctgaggattagtggaatatcgtaaatgagcggtgaaaccgatcgtttgcggtatgtaactaaccggaagcggatgtctactggagcacgttttagtacaagagtgctgactattgcatttagtcattgagcattaataaaaaattgccattaatcccggttttaggattaatggcaattttagattaagcggaaatggctgcgacgggatgcgcgttttaaaatagagtgatgagtcgaacgtttttggctttgaggattaacagaaaaatgatgcttatggtggttcttagccataagcatcattttacggttaaccggaaaagacagttcgaggaagcacgtttctctaaacacccgagccgattattaaggcgcaggtgttttttcgattattaccaaattgccatcagatgagagtcagattagttagttatttaattggaactatgctagaatggaaaggtaagccgattttggcgcttgaggtttcttagagaattcttatcattgattagaatttagagagtccattaaaaattcttttttggggagtgactaaatgagtcgcatattgattattgaagatgagaaaaatttagctcgatttgtggaacttgaattaaagcatgagggttatgagacagaggtccatttcaatgggcgtactggtttagaagctgccttgaatgaagaatgggacgcgattttattagacttgatgttacctgaattaaacgggttagaagtctgccgtcgggtccgccaagttaagaatacgccaatcattatgatgacggctcgtgattcagtgattgaccgtgtttctgggttagatcatggcgcagacgattatatcgttaagccttttgccattgaagaattattagcgcgtttacgggcattgctacggcgaattgatatcgaaggcgaacataacgctgctaaacaaacgacggttacttaccgtgatttaacggttgaaaaagaaaaccgagttgttcggcgtggtgatgatgtgattgaactaacgaaacgtgaatatgaattattattaatattgatggaaaacgtcaacgttgttttggcacgcgatgtcttactcagcaaagtttggggttacgattcggatgttgaaaccaatgttgtcgatgtttatatccgttacttacgaaataaaattgatcgttctggcgaacaaagttacattcaaacggttcgtggaatgggttatgtgatgcgctcgtgatgcaggacgaaacggtagcatcaacaacaaataagggtcgtaaaatatcgttaaaggtgaaatgggcagctgcggttgggttggccatttttatcacctttgcgattttttcaattgtgatctttagtagtatctctaatatcttgctacacagagaagtcgataatgtgcacgatacggtgaccgtcgtacaagcgagattgtccagcaatgggccacatcttacagaaggctttgtcaccaatcaattggatccgaaccgtcacagccctaaagccatctatcaagatgcggttttaacgcggttagcacaacaggatgttacagttaagatttatgatgcaaacaagaagggtttgtttgcatcgcgcggggcgattggtccgtttccaaaaggcgatacggatacattaaagcgcaaagctatttttggtaagatgcggctgattggcattagtccgattaagacaaatcaaaaccgtgtaattggttatgtagaggtggtcaataacgtccgtgattataaccacgctatgactgaattaagaattgtgttagttgtggttgtcttttttgctatgttatttagtgcattgattggctatttattagccaaccaattcttgcgaccaatcgaagttatgaaaaaaacgatagaagccattaattcagagcctaattcagatgtccgaattcctgagactgggcatagtcaagatgaattatctgatctggtcagtgcgtttaatggtatgttgaatcgaattcagcattatttcgaacagcaagaccagttcgtcagtgatgtttcgcatgagttgcggacaccagttgcgattattgaagggcatctacaactgctcaatcgatgggggaaagatgatccagaggtactggaagaatctttagcggcttcgttacaagaaatcttgcggatgaaaaatttaattcaagaaatgcttgatttaacacgggcagataaagtcgtgactgaaggaacgactgaagtgaccgatgtcggggaagttgttcttcagaattaccataacttcgagatgttatatccagaatttaattttatgctcgacaatgatttgcaccaaccagcgctagtgcatgttaatcgaaatcacttagaacaaattatgattattctgttggataatgcgattaaatattcaacgatacgtaaagaagttcatattgccgtcgctagtgatgagcggtatgcgcaagtggccgtgcaagactttggtgaaggtatttcggaagaagataagaagaaagtctttcaccggttctatcgcgttgacaaagcacggagtcgggaaaaaggtggcaatggattgggattagcaattgcccaacaactcgttgaaggctatgacgggaatgtgtcgctagaaagtagcgttggctacggttctgtttttagagttgagttaccactgattcgtgaagtagaaccaaaatcagaagaaccagttaatacggattaaaaaagcggtgcgcttcaatcatctaattgattgaggcgcaccgcttttttttgttggttaagcttgtggcttatgccgttgcttacctgagttgcgtctgccagctactttaggtgtagcgacagttgggttgcttgtttctgttggtgtttctgtgacgtcggcagctggtttgactgctgctttttgagtgaacatttcttttgtgacaaccgtgacgattggtttttccttaatttcttgatcgatccgttttttaacacgaggcatgatgatgaatgtcgtgattaattgttgaatcaccatgataatcccaccggctaagaaataaagtgctaaaccggctggtgcaaataacgaaatgaagaatgtaatcgcaggactcattaggacggttgtttgcatttgtttcttttgttcagcaggcatcccgactaatgaaagtgcactttgaccgacatataagagggtcgcaatcacagtaatgataatgtttgggctcccaagaccgatcccaaagaagtggctacttgaaatttcaggtgagtattggatggcttgatacaaaccagagaagattggtaattgaattaataaggttaaacaaccaagacttggcatcatgcttgaatcattttccttataaaccttcatcatcaactggctaagttcagccttttcttcaggggttgttgccgctttttgttgttcttggataatatctaattgcggtttcaagcgacgggtcttttcttgttgggccgtcatcttattcgattggttcaacattaatgggagtaaaatcatccgcacaacgaatgtgatgatgataattgcccagccgtaaccattgatgccaccgaaaacatcagcaatgcgttccataatatgttggagcggcacggcgatgtatttataggatgaaccatagattaagccggttgggactttgggatggctgctcattttttgtggaacacagccagcgagaaagaatgtaacggtcattgtaagcatcgcgagtgtcgcgaagcgtttagaatttttcataaatttagccctttcaagataagtttcaacaagtgtaactatacttgaaggggctaggtttttcaactgacaaccgaaaattcatgacacgctgacacattttcgagtggtgtttgaatgacacggtcgacgcgcccactaggggtgggagaagctttgacagcaccgataaatttttcgagtgcgtctgctgggcccatcgcaataattttaacggagccgtcgtcacgattggcaacggtacctgtgatatggagtttatcggcgaccaatttggtcatccagcgaaatccgacgccttgcacgcggccatagacttcaagttgaattgcattttgcattgtcatcacctcctcttcattgtaagctgttcaacccgatttggcgattaaaaagcgacccttgatagaatttacccactaagtcgcgtataatagaaagtactaaatagactggagcacaacatggaatacattcaatcgaatcaaaacactaaaattaaggcggctaagaaattaaccgttaagaaaaaccaacgtaaagaaaatacgtatctactagagggctggcatttagtccaagaagcaatccaaaataaggccgtcatccgccaagttttcgccactgaaaaatatgtggacgaacgcgcattgcgcggtctttacgatgaaacttttgaaattgcaccagaagtggcgcaacacttgagtgaaactaaagcaccccaaggcatttttgccgttgttgaaatgtctgaaacaccggtgccagaaaaattaacgggtcgttacttattattagatgctgttcaagatcctggtaatatcggcacaatgattcggacagccgacgcagcagactttgccggcgttgttttaggcaatggcagtgttgacttgtataatccaaaactcttgcggtcaatgcaaggcagtcacttccatttaccgatttatcaaggtaacttgatggactggatgaagaaattcaattcgcaagacgtcccagtttatggaacggaattaaatccagaggccatcagttatcaagatgtgcctaaagcaaatgacatggccttgattctaggtaatgaagggaacggcgtgaatgaaaacgtcttagcagccacaacgcaaaatatttacatcccaattccagggaatgctgaatcattaaacgtggcagtcgcagctgggattttaatgttcaagttgattgaagcttaattcttaattttttctaacaaacgtaactttttaaggcgtttaacttcttttttgaacgaaaagctgttatccttgtggcagaatttgaatttaaaaaatgtcaggagtctttgaatgaattcaacagcaaaatggtacgatgacgcggattacatggctctaattgccgatttattagctaaagatgaagtccaaaaattagcgaactatacgcaacatcatcattcagatcgtttggaacattcgctaagcgtctcttatcgcagttatgaacttgccaagaagtggcatcttgatacgcgagcaattgcacgcgcgggcttattacatgatttattctattatgactggcgtgatacgaagttcgatttaggcacacatgcttatatccatccgcgcattgcgcttcggaatgccgaaaaattaacagaactctcacctaaagaaaaagacatcatcgttaaacacatgtggggcgcaactgttagtcgtccgaaatataaggaaagttacattgtatcgatagtcgatgattattgtgctgtgacggaattttgtacaccaatgtggacgaaatttaaacaaaaagttctccgccaaacaccggcaattaacaagtaaagatgcttcaagctgataggttgctttttgcagcctttttcagtacacttcttattaataagtgtgaggtgaaaataatggtgattgtaaaagaaaacgcaaatgctgactgtcaagaggccttccaactgtgtcctaaatttgaaaagactttttcaattttaggtaagaagtggaacggcctgattatcgatgtcctattagaaaacggggcacaacggtttaaaaacttagtgcacagtgtgcctaagtgcagtgatcgcgtattggttgaacgattgaaggaactagaacaagaaggcattgttgcgcggattaccagtgatgattctgcgttgattgaatatcgattgaccactaaaggtgaagaattagcgccagtaatggctgctattcacgattggtcaaacgactggtatgcgacagaagcctagttgctaattgcggttatttacgttaaaatacaattattaaacaaagacgaaaaagagtaacctaatcattagttttcagggagaataatcagttgactgcaagttattcaactaagtttaggtgaagttcactttctgagttgaccattggtccggtattgcccgttagcgcaaacttgagtgtatgactggaatggtcgtaaactagggtggtaccgcgaagcttcgtccctttttgagggacgggctttttttgttgaaaaaaataaggaggaattgcaatgtcattgaaggaacaattagaaaacttacagcaaaagagtctgcaagaaattcaaagagttgttgatttagaggcgttaaatcaaattcgagtggaagtgctcggtaaaaaaggaccgattacagaagttttacgcggcatgcgtgatttaagtaatgaagaacgacctaaggtgggggcatttgctaatgaaatcaagagtgatttggcagaagcaatcgaaacccggaaggcagaattagaagccaagaaggcagcagcccaactggctcacgaaacattagatgttacattacctggccaaccggtcaaaaaagggaccccgcatgtcttaactcaagtgattgatgatttagaagatttatttatcggaatgggttatcaagtcgttgctggctatgaagtggaagatgaaaaacataactttgaaatgttaaacatgccagctaatcatccagcccgtgatatgcaagatacgttctatattactaatgatttattgatgcgcacgcacatgtcacccaatgaagcacgtgacttggaaaaccatgactttgctaatggtcccattaagatgattagtcccggccgtgtttaccgccgtgatacagatgatgcaacgcattcgcatcaattctatcaaatggaaggccaagtgattgataaaaacattacaatggcagacttaaagggaaccttagaatatacgattcaccatatttttggtgaagaccgtgatttacgtttccggccaagttactttccattcacggaaccatctgttgaagtggatatttcttgtttccgttgtgatggtaaaggctgtaatgtctgcaagcaaactggctggattgaagttttaggggctgggatgacacatccgaacgtcttaaaagccggcggtgtcgactcagatgtctatggtggattcgcctttgggctcggggttgatcgctttgcaatgttgaaatatggtgtggatgatatccggaacttctacttaaatgacgttcgattcttaaatcaattcacacaggagggctagaccatgaaagtttcttacaactggttaaaagattatttagatttaacaactgccccagaggcattggctgaaaaaattacccgaacagggattgaagtggctgatgtcgcgcaaaagagcgcgggcttgaaaaaaattgtggtgggacatattttaagttgtgaaccccatccggattctgatcacttgaatgtttgccaagtggatgttggtgaagatgaacccttccaaattgtttgtggtgcacccaatgtcgctgctggccaatatgtagtcgttgcattacctaattctcggattgctgacaacgttaagattaaaaaaggcaagatgcgcggcgtggtttcaatggggatgatttgtggcttacaagaaattggctttgccgatagcgttgtgcctaaggaatatgttgatggcatctttgtcttcccagaagcaattgaacctgggacagaagtttatgaagctcttgggatgactgattacattctcgatcttgacctcaccgctaaccgagccgatacgcttggcatccacggtgtggcccatgaagtggccgccattgaatcattgacacctcattttgaagatatcgtagtgactgaaagcaacgttcaaacagctgatcaattgactgctcaagttgctgatgaacaattagcaccaagttatcacttgcgtatgttgcaaaacgtgaccgtccaaccaagtccaatgtggctacagacgcgtttatggaatgctggcattcgccccattaataaccttgttgatgtgacgaactacatgatgttaacgtatgggcaacctttacacgcgtttgatgcggatgctctaacgggtgatcacaaacaaatcgaagttcgtttagccaagacgggcgaaaaattaacgacccttgatgaaggcaaacatgacttaacaaatgaagatatcgtcattacagatggtcatcgaccaattgcgctagcaggggtcatgggtggtttgaactcacaaattactgctgatacgaaaaatgtgattatcgaagccgcagtttttgcaccaactgcagttcgtaaaacggctcaacgccataacttgcgttcagatgcgtcatcacggtttgaaaaaggcgtgaatgttgctgatgttcaaacagccttagatgctgctgctatgatgatggcagaccttggtaatgggcaagtgactgctggtacggttagcccaactaacttagtgccaactgacaaagtgattgaaatcgaagctgaccggattaatcgcgtcttaggcacagagattgcaacgcaaacaattgttgaattattagaacgatttggttttagtgtggtcaatactgataatcatttaacagtaacgattccaccacggcgttgggatattgaaatccaagcggatatcattgaagaagtcgctcgtttatacggttacgataacttaccaagcacattgccaactggcgatatgacaaccggggcattaacgactgaacaaaaggcactccgtaaaacccggcatacacttgaaggtgctggtttaacgcaagcaattagttatgcattaacgacccctgaaaaagcgcgtcaatttatgcttgttgattcggcgctgacagcacttgattggccaatgacgcaagatcatgcgcacttacgcatgaacttgattactggtttattggacgatgctgcttacaatgtggcacgtaaacaaactgatcttgcactatacgaacaaggacgggtatttttaaaacaagcagatgaccaagttcggccaacagaaattgaatatgtggctggcttaatgagtggcaatcgccaaatgaagacttggcaagctgccgcagcaccagttgatttctacacaatcaaaggtgtggttgaaatgttgatggcaagttacaacttagcggatgcaatcagttatcaaccaacacaagcttatccagaaatgcatcctggccgaacggcagccatttacgttggtgaacaactggttggatttgttggtcaaattcatccagcagttgcgaaagctaatcatttaaaagaaacttatgttttccaattagatttagcacaaatcctagccttgccaacccaaacagtgattgctaaaccagcacctaaattccctgaagtaacgcgggatattgcaattcaggtgtctgatcaagtttcaaatgccgcaattgttgaagccatcaaagcaaagggtggcgcccacttagtttcagttgaacttttcgatgtttacgcagggagtcatattgaggctggtgagaagtcaatggcttacaccttaacgtacctcaatgaggcagctactttaacagaagaagaagttaacgctgcttttgaaaaagtagtcgctgaattagttgctacttttgatgccaaaatccgttaatctcgaatctttaatgcaatttttgaataatttggtataatgttttaaggattgtatttaaaagagcaattaggaggtcatcctttgaagaaagttgatcaaaaggagccagtaaatcaagaaaaagcggcacaatcattatacgaagaacgccgtgcagaaaaaaaagcagcaaataaaattgtctattggattatcggtattctgttagcgcttgttgtcattattggattcatgggatatcgctacgtacaagcatctcttaaaccatacgacaccaaagcaaaacaagaaattaccgtgcgcattcccaacggctcaacgaataaacaaatcgctgctattttgcaggataaaaaattaattcgaagcgcgccagtctttaattattatgtgaagactcataatttctcggatttccaagccggttatcatgtgttgaaacaatcaatggggttagataagatcatctctaacttacaaaaagaaggcacaccaacccgtcctcgcgatgtgaagggcaaattgttagttaaagaaggggtcactttagaagaaattgcggccgaagttggtaaacaaacaaaattctctaaagcagccttcatcaaacaagcgaatgataagcaattcttagcaagtttagagaagaaataccctgcattattgtcatcaacaatggctcaaaaggatgtccgctatcacttagaagggtaccttttcccagccacttacgaagtttataaagatagtacattaaaagaaattatcaccgaaatggtttcaacgatggatcaaaagatgcaaccttattatgcaaccattaaggataagaagttaaccgttcaacaaacgttaacgctagcttcattggttgaacgtgaaggggtcacagccgtcgatcgccaaaagattgccggtgtcttctttaaccgtttagacatcgatatgccaattcaatctgatatttcagtaatgtatgcattaaatacccacaagacacacctttataacaaagatactaaagtcgattcaccatataacttatatatcaataaaggttatggcccaggaccgtttaactcacctagtttacagtctgtcacagccgtcttgaatccagctgatcgtgatcaaaattatctctactttgttgctaacttgaagacaggtaaagtatattactcaagaaccttcgaacaacataacgatacaacagattcgattgaagattaggttcatttaggattatcgaagtcgaccgctattggaggtcgacttctgtttgcccaaaaagaagttgagaataaaaggagcgtcccatgtccagtcaaaaaaaagcacccatcattatcggcgttacaggcgggtccggtagcgggaaaacaaccgttagccaggctatcgcccaaaaatttgcgaatcactcagtgatgttattaccacaagatgcgtattacaaacggcaagatgttccgtttgaacaacgccaacaaacgaattatgatcatccagatgcttttgacaacgatttattaatcgaacaagcattaatgttaaaaaatcatcaagccattgaacaaccggtctatgattataaaattcataatcggacggaggaaattcaacgggttgaaccgcaagatgttattatcttggaggggattcttgtattggctgatgcccggttacgggatttgatggatattaaggtttatgtggatactgatgatgatattcggttattaagacggatgcatcgcgatatggaaagccgtggtcgaacgtttgatgatgtggttggccaatatcttaagacggtaaaacccatgttccatgaattcattgaaccaaccaagcgttacgctgatttaattgtcccagaaggtggcaataatcgcgtggccattgatttacttgtaacaaagattcaatcaatcctaaatgccgattaaagattgagatttgacaaggacgtacacagtaattaagatagtcagtattattaattaaaataaagaggtggataaaatggtacaaaaaacttatccaatgactgcagaaggcaaagaaaagttagccgaagaactagaaacactcaaaatggtaaaacgaccagaagtcattgaccggattaaaattgcacggagctttggtgatttatcagaaaactctgaatatgaatcagctaaagatgaacaaagctcattggaaacacgcatcgcagaagttgagaatatgttacgctttgcagaagtaatcgatgttgatagcatcgcagctgatgaaattgctgttggtaaaacagttagctttacagacgacgaagatggtgaagaagaaacttaccaaatcgttggtgctgcagaatcagacccattcagtggtaaaatttcaaatgattcaccaattgcccaagcattacttggcaaacacgttggtgataaagtagctgtgcaaacaccaggcggcgacatgcacgtcacaattacagaagttaaataaagtgcgtttcgaacgggttagtctttgaggattaacgtaaaaacgggtgttatggtcgaattttgaccatgacgcccgttttgtagttaaccggaaaaggttgttcgaaaaagcacgtttaagaatagagtgcttttgggtgcggttagcaactgagcattaatacaaaattggcagtcatccagattttaggatgactgccaattttagattaagcagaagttgttgcagccaaaaagcacgtttcaaaaaagccacggaaatcaatcccgtggcttttttattttgccgttaattcgttaatcagccttgagacggattggtgtttatctggtttgcttgtataataatattaatcagttgaaaggagaccgtaaatatgccgtttatctggcgcgtttttttaataatagaagcgattatcttcgggacgttcatttggcagatgattacgatacccgcaaatttagtgttcatcattgcaggtattttactcttagtctgggccaacaaacgtcgtagtaaaggtaaaatcggtgtctggacgactttgttaacgatggtcggttgcgtagctgttacggtaccactgttaattaatttctcgttatggttaatgattattgttgcggtcgtctttttagccttaaatcatagccgaatgggacagtttagcagccgcaatatgaatcagttgtttgataatgccccttggcgcaagaaaaaatttattcccgttaatacgacggaacccaccgcgaaaaagacaacagtcaagcggcatagttggtttggtcatcagacaattggcaataacatttttgaatgggatgatattaacttcgcggtcgctgccggtgatacaattatcgatttagggagcaccattttacccaagaatgacaaccatattgtcatccgtaaggggtttggaaagacacggattttagtgcctgtcgggaccggtgtctatcttgatcactctgcaatgttagggagtgtgacaatcgacaatcagcactataatttgaaaaatgagtcgattcagttgtatagtacaaactatgatgaagaaagtcgccaccttaaaatcattaccaacgtaatgattggtgatcttgaggtgatcttagtatgagcaagttaacgcggagctttatatggatcagcacgagtttgttgacgcttctgttttcagtggcgttattttttgcgtatttctacagtacgcatcaggaacaatggctgattagtttggccacgaagcaattattctatgtaccactgattgtttatattttggtggccgcaatggcagtaggctttttagttaccgcaatcgtctatcttgtcgtacgtaagcaattatcccatactgaaagccagttacaatttttactttctggacagtatgaatcgcctgtttttcagattagacagagcgaaaccaatgactacgcgatgtcaatcgagcaaacagttgaacaattacgccaaaaaatgatacgcttacaacaagagattcaaagttatagtgatcggccgaccgtgattgctggtgaaaccaaggaagaaattctagcgcaagaacggcatcgtttagcacgcgagttacatgattcagtgagtcagcaactatttgcggcgacgatgatgttgtcggcactcagtgaagttgcgcaaaaacaagctgataacgcgcagatgttgcagtccttaacgacagttgaacgggtgttaaatgaggctcaatcagaaatgcgggccttactcttgcatctacgaccagttaatttggaaggcaagagtttacgcgatgggatcattcagttattgaacgaattgaagaccaaaattgcgattcagattacatgggacattgatagcataacgttaccaagtggcatcgaagataatttatttagaattgtccaagagttgctgtcaaacacactacggcatgcgaaggcccaagagattgaagtatacttgaaacaactcggtcagagtgttttactaaaggtaattgatgacgggaccgggtttgatacgaatgctgagcaaaaagccggcagttatgggttaaacaacattgtcgaacgggcccatagtgttggagggacggcaaaaattattagtttgcctaaccagggaacgagtgttgaaattcgagtgccactattaaaggagaccaattaagtgattaatgtattgatagtagacgaccatgaaatggtgcgattaggcatctcaacgtatttaggggttcaagacgatattcatgtcgtcgatcaagccgtcaatggtaaagaaggtgtcgaaaaggcgcttgcattacgtcctgatgcgattttaatggacttagtgatgcctgagatggatggcattgaggccaccaaaacgattttaaaggcgtggcctgaagccaaaatcattatcttaacgagttttatcgatgatgagaaagtttatccggcgattgaagccggtgcggccagttacatattaaaaacttctacagccgaggaaattgccaatacgattcgtaaaacggcgcaaggacaatcggttttagagccagaagtgacgaataagatgatgaatcgcttaacacatccggctgaacctaagctatatgaagacttaactaatcgcgaacgtgaagtcttaggcttgattgccaaaggccgtagtaatcaagagattgcggatgaattattcattacgttaaaaacggtcaagacgcacgtttcaaatattttggcgaagttacaagtggatgatcgcacccaagcggcaatttatgcgattaagaaccaactagtcgattaatcaggaggagttcaacatgcaaattcaggtgtcagatgcagcaagtcaatggtttcgcgacgaattagccttacaatcgggggatgcagtccgcttttttggcaaagtgtatggtcaaacgaccgtgcatgatggcttttcattgggcatggaacgcgctactgttgagcagccaattggttcggttgttaaagatggtatcacctattttgcgagtcaatcggacgaatggttttttgccgattatgatttacaggttgattacgatccagagcttgaagaacctaagtatcaatttgaacgtcgttagacgataaaaagccccgccaaatcatttagcggggctttttattttgggttaaaaggcgaccagtacgcgcccagttttatgcgtcttttggctaagttctcgggctaaatcagaaaaggcgaccaagttaactgttggccaaatttccggtttaaacgtcgtggcgagtaattgccagagttctttacggtctttgcgcgggtaatagactgaatcaattccggctaaggtaatcccacgtagaataaacggcatcaccgttgtttctagggttgcaccagcggcattgccacaagttgctacgaatccgccggcacaaacttgcggtaagatgtgggctaaaacaggaccgccaagcgtatcaataaccccggtgaatgtctgatggctgagcgctttaagcggaccagcagttaggtcagctgtattaataacatgggtcgcaccaaggtgcaataaataatcggtttgttgcaagtcacgcgtagttgcggttagatttgtgaagccaagctgcgcgaggatggtaagtgcgaaacttccgactccgccagtggcacccgtaattaagagtggggtgtcatgatcggctgtaaaggcttggcgtaataatttgctgagcgcaattgcggcggtgaaaccggccgtcccaaactgcatcgtttcagcaagactaagattttcgggcaacttaaagagccattcactagggactttgacatattcagcgtagcccccagcgattgtaatgccagtttcataacccgtacataacacctgatcgcccgcttcaaagaacggattatccgattcgacaacttcgccagcaaaatcaacgccaggtgtcatggggtagtgacgtaagacgccacttttaggattcatagcgagccggtctttgtagttaatatcagaataggcgactttgactaacaccccgtctttagcgaggtctggcgttaacttagtttgataagtggcactgacagtagtatcggtttgttctaaaacgagtgcttgataggcgaccatatgattacaacctcatttctaaataattatttaacttcattatacaacaatgttcgctttgaattggcattgcgtctcggaaacggtataattaataggatattagtcaactaataacgagtctgagagtgctaaagataaaggggacgaagaagaagatgcaacaaccaatggtggaatttaaaaatgtcattaaagaatacgacgatgtccaaattttaaagggcatcgacattgcgttggaaaaaggtaagttttataccttacttgggccgtctggctgtggtaagacaactattttaagaattatcgccggatttaccaatgcgtctgccggggatgttttatttgaagggcagaagatgaacgatttaccggccaataagcgccaagtcaatacggtttttcaagattatgccttgtttccccatctaaatgtctttgagaatgttgcatttgggttaaatctacgtaaagttaaaaaagcagcgattaaagaaaaagtgattgaagcccttaaattggtgcgccttgccggatatgagaatcgcgaaattagtgagttatcaggtgggcaacaacaacgagtagcgattgcgcgcgctttggccaatgaaccaaaagtcttgctactagatgaacctctatcagcactcgatatgaaattacgaaaagatatgcaatatgaactacgcgatttacaacaacgattagggattacgttcttatttgtaacgcatgatcaagaagaagccttagcgatgagtgatgaaatttttgttatgaacgaagggcgcgtgttgcaaagtgggacacctgtcgacatttatgacgaaccgatcaaccatttcgtagccgattttatcggggaaagtaacattctgccaggtaaaatggttgctgattatcaagttgaaatggtcggcaagcagttcgaatgtgccgatgccgggatgcgggtcaacgaagcagttgaagtggtgcttcgtcctgaagatctagacattgttgccgttgaccaaggccaattagtggtaacggttgatacgcagctatttcgtggtgactattatgaaattacggcctatgatgcggatcaaaaccggtggttgattcattcaactaacccagctaaagatggtcaacgagtcggcttattctttgaaccagaagacgtgcacatcatgcgttttggggaatcagaagaagatttcgatgcacgacttgaaagttacgaagaggaggactaaggcaattgcgtaaaaaacaatggttatattacttaccatatgccctctggctaattttgttcgtcctcgcaccagtcgcattgattgtgtaccagtccttctttgatatcaatgggcatgcgacattggtcaactacacgacctatttccagtcaggcacttacttgaagatgacattaaattcgttatggtacgcctttttaattacgctgattacgctattaatcagttatccgacggcgtattggcttcatcaaacgaaacataaacaactttggctattattaattattttaccgacatggattaacttattactgaaagcttatgcgtttatcgggatttttagtcaagatggtgccattaatcattttttggggtggttcgggattgggccacaacagattttatttacgaatttcagtttcttagtggtggcgacctatattgaaattccgtttatgattttgccgatatttaatagtttagaagaattgaatccatcattggtcaatgcaagtcgtgatcttggcgcaagtaattggcaaacctttacgaaagtcatcttaccgttaacaatggctggggttaaagccgggatacaggccatctttattccatcgttatccttattcatgttgacgcgtctaatcgggggtaaccgcgtgattacgctggggactgcgattgaagaacacttcctcacaacaatgaactggggaatgggctcgaccatcggggtggtcttaatcgtcgccatgggcttaatcatgctggtaaccggggagcaaaaagcaaagaagaaggtgactaacaaatgaaaaaaatgaaatggcaaaacgtttggttagtgcttgtctctgtcttattgtacgcaccgattttctatttgattttctattcatttagcagtggggataatatgaatggcttcaaggcatttacctgggcaaattatcaggccttgtttgaagatactcggatgattgaaattgtgttacaaacgttattaatcgcgattctatcatctttatgtgcgacgattgtggggacgtttggggcgttagggatttattcaacgaagcaacggcgtgtgcgcaatatgattttatcgctgaacaatattttaatggtttcacccgatgtcattatcggggcaagttttttaattttcttcacgttcttaggttttggtttgggctttggttcagttttactgagccatatcgctttttcaattccgattgttgtcttgatggttttgccgaagttaaatgaaatgcggccagcattagttgatgcggcacgtgatttaggtgcgactgactggcaagtcctgagtaaagttattttaccgtacattagttccggcatttttgcaggctttttcatggcgttcacctattcgctagatgattttgccgtgaccttctttgtcactgggaacgggtttgaaacgctctccgttgaaatttactccagagcgcgtcaaggaattagtctagaaatcaacgcattatctgccttgatgtttgtcttctccttaatccttgtggccggctactatttattgaatcaaagaagccaagcccaaaaagcacggcgtaaacggaaagcgggggcttaaaatgaataaattaggacgcatcactttagcgattttagtggtctgtgcagccctttggtttgggacggttgaattacaaaaatcacaaggttatacgaaaaataatacattaacattatataactggggcgattatatcgacccagcacttattaaaaagtttgaaaagcaaactggttatcacgtttcggttgagacgtttgatagcaacgaagcgatgtacacgaagattaagcagggtgggactgcttacgatttagcggtgccaagtgagtacatgattgaaaagatgcgcaaagcacacttacttaaaccgattgatcatcgtcgcttaaccggctatcaaaatattggcaaggattttttgaatcaatcatttgatcctgggaataagtattcattgccttatttctggggcacactcgggattatctacaacgatcaattggttaaaaaaccactgacacattggtcagatctatggtcaccagattatcgcggccaaattatggtagtcgatagtgctcgggatatgatggccgtgggcttgatcgaaaatggccagtcagtcaatagcacgaatccggcggttttaaaggcggctaaggacaagcttgatcagatggcaccaaatgtcaaagcgattgtagctgacgaaattaagatgtatatggttcaaaatgaagcgagtgttgctgtgacttggtccggtgaagctgccgagatgttggataataatccccatttgcactatgtaattccagaagatggcagcaatctatggtttgataatctagtgattcccaagacggcaaaacatgaaaaggcggcctatgccttcttaaactttatgttagagcccaaaaacgcggctcaaaatgctgaatatattggttattcaacgcccaatataccggccaaagcactcttgccagcagcaacacggaataacccaggctattatccaagtcaaaaggtgatcgatcgcttgcaagtttatagtgatttatcaccaactgcggttggccgttataatgatttatttttagagtttaaaatgcaacattaaaagtacaatgagcagattgaaatggttcatggtataatagatacagaatttttttggatggaggttacctatgtcatttgaatggtcacagttattaacgtggcggatgctcgcaaatgtgctagacatcatcgttgtctggtattttgtgtataaattaatcatgttgattcgcggtaccaaagccgtccaattgtttaaaggcattatagtcattgcgctgattaaggttatcagttggtacattggtctacgaactgtttcgtacattatggatcaatttatcagctggattgtgattgcgttgatcgttatttttcaacccgaaattagacgtggtttggaacatatcggacgtggatcgctactacgacgcggcgttaatcccaaaattgaacaagaaaataatttaattaaagccctcgataagtcgattcagtatatgtcgaaacggcgtatcggggcgctgattacaattcaaatgaataccggtttggaagattatatcgaaactgggattgatttggatgcggatgtgacgggggagttattaattaacatctttatcccgaatacaccattgcatgatggggcggtcataattcgcgatgataagattgccgttgcggccgcttatctaccactttcagagagtaatttaattcccaaagaattagggaccagacatcgggcagccgttgggattagtgaagtaacggatgctttgacgattgttgtttctgaagaaaccggtggtgtcacattaacgcgcaataacgagttaatgcgtgatttaagccgtgatgattatatgaagtacttcaactcgcatttgattacccaagaggaaaacaaaacgagtctcttacaagaatttgttgatggcttcaaaaaaggaggccagaaatgatgaaaaagtttgttgaaggcccatggctctatcgaattttagcgttatttctagcgttgttactgtttggttatgtcaatttggatgaaattaacacgacgcgccagacgaataacaatgatacacagatgctagcaacccgcacggaaaccgtaaaagtgccgctccagattaatgcggatactgatcggtatttcattaccggctatccacaaaaggtcaaagtgaaattatccgggccgaatgcgctagtcacatcagcagttaacacattaaatttccgcgtgattggcgatttaacgaagctgggtcctggtgatcacaccgtcaagttaaaacagacggggattaataaagatatcaaagtcacgattgaacctaaagaaattaaggtccacattgagcacaaagtgacaaagcaattccctgtgcaggtcaatgttaagaaagaaaacttagcggccgggtatagtctaggaaatccaaaactaagtcaagacgtggttgaagtcagtggtgcaaaatcagcagtgaatgctgtgtcgcaagtagtagccactgttgatcccgatgaaggcaccaaaaaagacatcaatgaagaagtcttgttgcaagctgttgatcgcaatgggaaagcgttaaatgttttaatttcaccacaaaccgttaacgttaagatattggttcaaatgagtaagaaaacactcccgattagtttggaaaagaccggtgaaaaaagtggctacagctacagtctgtcatcaacaactgattcagtgaccgtgtatggtcgtcaaacagctttagccaagttgacgtcgttaccagtgagtgtcgatttatcgtcaatcacgagttcaacttcaaagacggttaaagtggctttaccagacaacatttatgagagtacgccaagtgccattaaggtgacaattacggtgactccagatacgaccaatacgagtgctactaatactgttgaagcgccatctgaaagtacggcacaaacatcaagtagtgcgcccgttgagtcaagttcaagtaacagccaatcaagtagtcaatcaagctcaagtgaaagtagtaaagcaaataccgatgtaaatcaataatcaacgctaaagattttagcaggatgaatggagataattaaatatgacaaagtattttggaactgatggtgtccgtggcgttgccaacttagaattaagcccagaaatggcttttaaattaggacgtgcgggtggttacgttttgaccaagcacgctgataaggatcaacggccaaaggttttggtggctcgtgacacacgtatttcaggccaaatgttagaacaatctttgatttccggcttattatcagttgggattgaagtcttatcattaggcgtggtgacaacacctgcggttgcctatttaattaaggttcaagaagcaagtgccggcattatgatttcagcctcacataaccccgctatctataatgggattaaattcttcggcgcagatggttacaaattaccagacgcaactgaagaagaaattgaagcaattattgatgccgaagaagatactttaccacgtccagaaggcgctggtctggggacggtggaagaatatccagaaggtgctttgaagtatacccaattcttagaacacacgattcctgatgatttagctgggattaaagtggcattggatggcgcaaacggttcaaccagtggtttaattagccgcgtatttgctgatctagaaacagaatttacaacaacggcaacccatccagatggtttgaatatcaacgatggtgtcggttcaacacacccagaaaatgttgctaaaagagtgcttgaaacaggcgcgcaagttggactagcatttgatggtgacggggatcggtgtatcgcagttgacgaattaggtaatattattgatggggacaagattatgttcattctcggtcaatatttatctgataagggtcgtttaaaacaagatacgattgtcacaactgttatgagtaatatcggcttgtataaagcgattgaagccaacaacatgcaatcagtccaaacagacgttggggatcgtcacgtcgttgaagaaatgcgtgaaaaaggctataaccttggtggcgaacaatcaggacacatcatcatctttgattaccacaatacaggtgatgggatgttaaccgggattcaactcttaaacgtcatgaaacaaactggtaagaagttatctgaattagcagcccctgttcaaacttacccacaaaaactcgttaacttaacagttaaggacaaggatgcttggttaacaaatgacaagatccaagctgccattgataccgttgaaaaagaaatgaatggtgatggccgcgtcttggttcgtccaagtgggacagaaccattgctacgagtaatgtgtgaagctgcaacagaagaaaaagtaaatcaatatgctgatcaaatcgcagcggttgttaaagctgaaattggcgcataattaaagggagtgctgacgcgagttggttaggctttgaggattaacagtaaaatgggggttatggtgtttcttgccataatccccattttgcagttcaccggaaatgactactcgagaagcgcgttcaagttggtcaacttttgagcactagcttgaaaagcacgttctcacttgaatcaaactaaaaaagcccgtcaacattgtgttgacgggtttttttggtgcaattttatttaagagcccattcttctaacgcaatgtgacttgttcgtacatcagaaaaccaaagacaaccaataagacaacagcagcggatatcagataccattctttgacaagtatgataggtgcatcagtcagatgataatttttgcggtaacgtttgagattgaaaacactgacttcattcacgatgattaataaagcgggttctaatagtagcatgtatttactaccggttgaatcgacaatgttattggcggcaatatgtaaggcgattgttttaggtgcaacgacgataaagctcagtccgactaataggccaagaagagaaatacttcgaattaacaagatgctctttttcattacagaaactccttttctaaaattgactggtcttagtatagcataaaagcgctagatagcggaaaatatttggactataccaaaattataaatttatatataccaataaaaatgttgacattaaaatcgttggtgctattatatttaagtgttgtaccaattgattaaagaatattaaaccaaagttgaaaagaggatttttataatgtgtggaatcgtaggcgtaattggcaatgaaaagacaactgaaattttattaaacggattagagaagttggcgtatcgtggttacgattcagcgggcatttacgtgaacagcgaaactgggcatgactacttagttaaagaacccggtaaaattagcgttctagaagcagcggttgggcctgaagtacaaggaacaatcggtgttggtcatacgcgttgggcaacgcatggtgttgcgagtcgtgataatgcgcatccgcatgtttctgaagatggtcgtttttacttggttcacaacggcgtgttaactaactatttagctttaaaagaaacatacttggaggatgtccattttgtcagtcaaaccgatacggaagtcgctgttcagttgattgcttaccttgctaagacagaacaattatcagctaaggaagccttccggaaggctttaacgttgattgaaggctcatacgcatttgtcatggtcgatcgtgatgatcctgacaccttatacgttgctaagaataaatcgccattgttaatcggtgtaggtgatggctttaacgttgtgtgctcggatgcattagcgatgttgaatgaaacaaaagattttattgaaatccatgatcgtgaaatggtgacactcacgaaacaaagtgttcaaattgaagatttagacggcacttttattcaccgcgaaagctatcatgttgaaatggatgctgatgcagcgggcaagggcacatacccacactacatgttaaaagaaatcgacgaacaaccagctgttatgcggcgtttattgaacgaatacgttgctgttgatggagagcttaaaatcgactcagcgttactcagtgcaatgaatgatgcagatcgcctctacatcgtggcggctgggacaagttatcatgccggtttaatcgggaagaccttgtttgaaacattaacgcacaagcctgtcgaagtacatgttgctagtgaattcggctatcacatgccgctattatctgaaaagccattctttatctttttaacacaaagtggcgaaactgctgatagtcgccaagtgttggtacaaactaatgccttacattatccaagcttgaccatcactaacagccaagggtcaacactttcacgggaagctgattacacattattattgcatgcaggccccgaaattgcggttgcttcaacgaaagcctacactgcacaaattgcagttgaattattcttggctgttgcgcttggacgccacaatcaactggtgctagcagaacaattcgatgtacatcatgaattaggcttagtcgctactggcatggaagctttattgagcgaaaaagaacagattgaaaccttgacgactgattacttacaaacaacacgcaataccttttatattggtcgtggtgaagattacgccttgagtttagaagctgctttgaagttaaaagaaatttcatacatccaagctgaaggatttgcagccggcgaattaaaacatggcaccatcgctttgattgaagaggggacacccgttattgcattcttgatggatgccaaaacgattgcgcacacgcgtggtaacttacaagaagtgactgcgcgtggggcaaaagccttgacgattgtcagcgaagaatctgctgaagcagatgatcagatcattttaccaaccgtaaacgacttattgacaccattattggggatcattcctggtcaattaattgcttactatgcaagtttgcatagagggtatgatgtagatcagccaagaaacctagctaagagtgtcacggttgaataaataatattcaaaaagcctcgttcaaagaacgaggctttttttgcgtttaatgagttggtgcatatgttgctcgaggaccgccaacgtattttggtcgtgaccgtaaagctgtgacatgtgcactacccaatgtatcaagggttgggcggacagggacttgaacgaatttcacgtgcatcccaatcgccgtatcaccgatatctaatccagcttgtgcaacgatatgttcaacttcaaccggatcactgaattgttcaaatgcagcgacggagcaggcgcctccagcgtgcatagcaggaacaactgagacaatttcaaagtcgtgtgcgcgggcaacctgacgttcaatcaccaaactacggttaatatgttcacagccttgcacggctaaatgaatccccaatggattgagaatgccacgaagtgttgcgatgatgacttcaccgacttctttgctagaagccttaccgatatgaccaccgacgacttcactcgttgaacacccgaggacgaacaaatcaccatttcctaagtgtgcttcgtttagaacatcctgagtcatctttgttaagtcttgttgaatttggtttaattgtaattcgtttgtcatttaaaaaatctcctagtggttaaataattgtggtcgaatacgggataaactagtgactaacgggatggtaaccacgataccaagtccattttgaacaatattactgaaaatcgaagcgattccggcagcccagccgaaaagtaaactggtagctaaaaagtaaccggcaaccatgacgatactaccgcaaatgagggggataatcagctgctttggtcgcattgaatcattacgagtcaggtgacctacaacgaagccttgccccccatgaatgatgagtgagaagagacaccactcagggtaaccagataatagatcgattaataggccactcagggctccgacagtgagtccgccaggatttcgcagcatgatcgccgttgtataaataccgacctcacagagcgtcacaaagcccttcgtcgccggaattgggatgatgattaacaaagagagtgccacggtcaatgcggtgagcatcgcgagtaatggtaattgacgtttattaaagtgcatgtttagtagccccctgccagacattccccaggccatggcgtagatgaataccatcttttaaaccggcataaacaaatttctttgcgcgtgccacggcaacttcaatcgattttccttgtgctaattccgccgcaatcgctgccgaaagcgtacaaccggcgccatcaatggtagttgtttccaatcgtggagcttctaaataatgagttgttgcgcccgattttaataaatcaacggcctgctcaccagggaatcgttgaccacctttgataatgacgtgcttggggccaaatgattggataattgtagcagcttcgaccatttcctcacgcgtggtaattgacgaaaggccactgagttgttgggcctccaacaagtttggggtgacaacgctcgtcaaagacagtagttctttttttaacgtatcaaggtacgcttgctgcgcaggaatggcgccttctttaaagacgaggaccgggtcagcgatgatggttaattcaggatgctgtcgtagtcgctcacagatggcttttaaagtttccgtttgatgaaccaaaccaattttaacgtgcgttagtggcacgtagtttaaaatggcatcaagctggtccaaaatggtatcctcaggtaagttgtggattttcaagtgaccgtctggtagcaatgtagcgatgcaagttaaagcactgaccccaaacgtttctaaggcctcgaacgtttttaaatcggcctggatgccaccaccacccagagtatcagagcctgcaatggttagaatgttttgcatagttgtcctccaaaattctattcttaactatcatagagaagaatagaatgttcaacaacagccaattggcttgtttttttaccatccaatttgtaaactaaataagaggtgttaaaaatgattgaatggttacaatatttacctgaacaaaagccaaagtatatggcaattaaaaaaatgattattagcttgatagataaaggacaattaagttcaggtgaccaattaccgccagagcgtcagttagctaaattattgagtgtcaatcgttcaacggtgacacgtgcgtctgatgaattggttgcagatggcgtgattgaacgtcgcgttggtagcgggacgtttgtcagccagcaagcgcgaccacaggcaaggcgggtcaattggcatacttatttgatcagccaacgtcagtcacaaagtcaaaatgaacggcgccaattacaacaactgattagacgaaaacctgaaaagttaattgatgtttattcaagtgacttaccattagaattagtcccacaatttcaatttcctgcattgacgtggcaagattttattactgcacaagcattagaggcaccacgaggctatcaaccacttattacggcaattaatcaattggatcaacacaataaacggctattttttaccgaagagcagttattaatgactgccggtgtgcaacaatcactctttttaatattacagggtttattgacgccaggtgatgctgttgcaattgaatcaccctccttttttcatgactcaactttgtttgaagcgacgggtgtccgtgtctatgaagcttcagttgatgctgatgggatttatttgactgctttagaagagctaatcattaagcaccgtgttaagttggttattctcaatccagattatcaaaatccaacggggcacgtaatgagttttcaaaaaagaaaagcagttgttcatttatgccagatgcatcaaataccaatcgtagaagatgatgtctttggttggttaggatttgatacaactaggccaatcccaacgttaaagcaacttgatccggataatgttatttatattagttcgttgtccaaaattatgggggctagtagccgaatcgggtgggtagctgctactccgcaagtcatcgaacagttgacccgcgtgcaacatgaaatggatttagtgccaagcattatggcgcaagtcatggtgaccttagcgatgggggatccgcaatttcaaacgcagttggatcaacttaaggggacgcttcaagaacgtgcacaagcaacctataagatgcttgaaagggtattacccgattggcacgtttacttaccagcgggaggttattatatttgggtgacccattcgaaccataaattacgcttaaaaacctttattgatcatcagcttgctgtcgcaccaggatcattatttgggcttaaaacagatgcgttgcgcatcaattttgcgcgattaaatgcaattgatttggtcgtgctagaacaacgattagtagccattattaaagcaacagaataaagagggggattcggatgacagagcaattcgtaccagagatttatacaccattaaaaaccagtgttgtcggaccacctgctgtggcgcgacaagttggggggattaagatcctcggtaagaagattaaaacaattatttttaccaccgatgttgcgattgtgaataatacaaatgctgacgctgttttggcagtttatccatttacaccacacccagctgtcatgaatgccatcagcaatgtggcgacgatccccgtttttaatgggattggtgggggcttaacggccggcagccggtccgcgtacatgggattattggcagaggccgccggttcgattggcgtggtggttaacgcaccgacctcggtggagacgattaaaatgattaaccgcgttgttgacgttccgattatttgtactgttgtgtcagaacaacaggattacgccgcgcagattgaagctggagtttcaattttaaacgttagtggcgcggctaaaaccccagcaattgttagtgcaattcgccaacaatatcccgaaattccgattatggcaactgggggtaaaaacgaagctagtatattagcgacgattgaagcgggtgcgaatgcattgacgtacacgccaccgaccaatggtgagttatttgctaagaaaatggccgactaccggtctgatttagcatgataacagttgacgtgctatgcaatcctccgtatgataaaaagattactagaggaggtctttgaatgattcgtcaagcaacagttgcagatgccaagagtgtcttaccaatcattaacattgtttttgaagaaatggaaatgccactcttccaaaagattccgttggaggatttatttggtattttagaacaggcctttgcaatgcctgaatatcggtatagttatgctaacacactagtttatgaagaagacggccaagtattggggattgttgtaggcttcccagaagaaaaggaagcccatatcgacgatgcattagcaccgttattcccacaaatcggcttacctgagacaacgcgtttctttaccgataaggaagcacaaccgggggaatggtatttagatacacttgccgtcgctgaacatgcacaggggcatggtgtagggacaaagttacttaaggccttaccagattatttaaaagcacgtggtgaaaaaaagattagcttaagtgtggatttacaaaatcctggcgctaaaaaactttatgaacgaatgggttttgttaaacaaggagatttaatgattggtgatcatcaatatgatcatatgattaaacagctttaacacgaaaagagccgacaacaattgttgtcggctcttttcagattaaagtaatggcataatcattgtcgtccatagccagctcagtggcatgactaagatcattgctggtatcatgtctgcaattggaaattcgcgaattttagcaattctaaagccagtggcgagcatcaagaggccgccgcaagctttgaaatctgcaagcattgttggattcgttagtgggaaaatgagtttggcaagtaagaaaatgatgtaaaagataatgaattgcggaatcgcaatggttgaaacgacggggccaagattgcaggcaaagatggcagcagtaaagaaatctagaattgatttagaaattagaatcgtattgttgcctgtcataccagcatctaatgtcccataaataccggtcccaccggcacaaaagaggacaatcactgtcacgagtgctgaaataaattcggtatctgatagcgtattgtttttacgcggaaaaatttagaaattggccgttccatcaagacggcaccgcgatcaatccagcgaccgaagtgaatgagtaggccaatcccagtaccgagaacaactgcgaagatgactgcaggcatgttcttcatttgaataatggcattgatgcccattcccatcgaagcaacaccgaagattaaggtgagttctgttttaaatttagttgataatttatctcccaataaactaccgaatagaccgccaaataagacggataatgaattaataatcacgccagttggcattgagaagacccctttaattttaagtttgcatattcaaccataccaatttaaaagaaaagaatcaatttaattttaaatgttagcgcttatatatattcgatgggagtcttgagctagaccaaaaaacgactaatcatttgattagtcgtttttttactgactattcgaatcgcaaactaggcttaaaacgccgaatcagtgccttgggttggttataggcccaatgatttaaaacggcggcaatcaaaatacaggggacgatatccttttcttggttgacagtcaattgaaaggctggaccgctgcttgctagaatggtggtcgcttgcatgatgggttgtgtatggtagataatgcgatattgattttgcgttaaatctcccataattaaccaattaagttgtttgacatagataaactcatgccagatgccccagatctttttgagttgaccaatccgttcatcgttttggaaaaggtcaaagtcaggtgaggggctaattgtgacttggcgaatttcaccgagtaagtcgccggtgagtgagtaaaggctgaatacgtcatgccgaatcccacgctttccaataagtaaataacgcggttgttcttgatcgtcaatcacggttgagacaccacgtgaagcactagcctggtgtttaatgtagaaaataggcatcaaagatcacttcttttcagctgtacgattcaagtcaatcgcgtgataaatcgcttgtgcgacgccgtcttgaatgttagttgcagtttgatagttcgcaagttccttaattgttgggacagcattgcccatggcgacaccaatgccagctgttttgatcattgaaaaatcgtttaagttatcaccaattgccattgtttgctcaactggaatccctctttgttcagcataggcggccaaagcgatacctttttgagcgtcaatgtggtttatttcgatgttattacttgaagaggaagttacaactaaatccccgcgggcttcacaaaatgccttaattggtgctaattcggtcattccctgtgtgctaaaagcgatgattttaagaatcttaaccgttggatcgttaataatcccttgatagtgatcatcgacgtagttaatattcattaattccaaacgggctgctgctaaagcaaccgcaattttataactcgtatcgggattgaggttgacgagtaaatcagcgacattttggatgcgactgactttgctatctgaataattaccggcagtcgtcatgagttcgaagtaaatattattttcgcgtaaattttctgtgacggctgtcaccgtttcggaatcaatcggcacattcaaaacttcattacctaaagaatcaaaaatttgggcaccattcatcgtaattaaagtaggttggatgtcatcactgtcaattagggggagggcttcagaacgactgcggccggtagccaccacgaattcgatgccggcgtcttgggcagctttaatggcggtcatgttaccgtctgaaacctgcattttgtcgtttaataaggtaccgtccatatcagatgcaataattgaaatcaaaggaattcctcctgaaaacgtattattagaaacttacctctatcttagcatgcaagctacttttcttctagcaacttatgttaaaacacgataaactagttaatgaggtgagcagatgaaaacaattattcacaatgagtggcaaacgattctcgcaccagagtttgccaaaccctattatggtcagctccatacctttttgaaacaggaataccaaacgaccacggtttatccagagatgcaccatattttccaagcctttgaatggacaccgtttgaacaggttaaagtcgtcattttaggacaagatccttatcatggcccgaaccaagcccatgggtgtagtttttccgttttaccaggggtcaaagtcccaccatcattgcaaaatatttataaagaattgcagacggatgttggctttcaaccggttcagcatggctatttaaagagttgggcggatcaaggcgtgttcttgttgaacaccgtattgaccgtgcgggcaggtcaatcaaattcgcatcgtaaacaaggttgggaacagctaacggatgcggcgattgctgcattgtcaaatcggggacatgtggtcttcattttatggggaaacgcggcaaaggataaacggcggttaattgatgagacgcaaaatgcggtcattactgcagtacatcccagtcccttgtcagcctatcacggtttctttggctctaaacctttctcacagacgaatactgcccttgagcaatggggcatggcgccaattaattggcaattaccacaaacagtcacggtagaataatgaagcgttaccattgttgacttgtcgcggtattagaaacgttgtatgattacattagcaataataaaatgcttactggaggttgcaattgtggatttatttgaaagcttaaaagcaaagattaccaatcggcaatttaaaattgtttttccggaaggaacagaaccaagaattattggtgcagcagcacggttgaatgctgatcggattttgaaacccattttaattggggcaacgaatgatattcaacaaatcgctgctgctaaaggatttaacttggacgggataacgattattgatccacaagaatatccaacagctgactttgaaaaaatggttgccgcttttgtcgaacgccgcaagggcaaggcaacccctgaacaagcacaaacaattttacaagatcctaattattttggcaccatgctggtttatttaaacttagccgacgggatggtttcaggtgccgtgcattcaacaggtgatactgttcgaccagcattacaaattattaaaacaaaaccaggtgtccaacgcacaagcggggccttcattatgcaacgcggtcgcgataacgaacgttacttattctcagattgcgccatcaatattaacccgaatgcgcaagaattggctgaaattgctgtggaatctgcaaagacggctgagttgttcgatatcgatccgaaagttgcgctgttgagcttttcaacgatggggtctgcgaaagcagacgaagtcacgaaggttcaagaagcagcacggattacacatgaaattgcgccagaattagacattgatggtgacctacaatttgatgccgcatacgtaccagttgttgcgaaccaaaaagcaccagattcaaaagtggcgggtcaagccactgtgtttgttttcccagaattacaatcagggaacattggctacaagattgcccaacgttttgggaatttcgaagccatcggaccaattttacaaggtttgaatcaacccatttctgatttatcacgtgggagcaacgaagaagatgtttacaagttagccatcattacggctgctcaagcattacaaaactaattgaccgacaacaaagacgccagcacagaaaaattgtgctggcgtctttgactttgcgaacagggcttttttcggtataatgacacacagataacaattagaatgaggcagaacatgttagaatttaaaacaactgatccagaacaaacaattgcgattgccaaacagttgggccaacaagtccaagccggtgatgtcttgttgttggatggtgatttaggcgctggtaaaacaacgtttacgaaaggcttggcagctggtctgggaattgaccgctatattaagagtccgacatttacgttaattcgtgagtatcaagacggtcggttaccactctatcatatggatgtgtatcgattggaagaaacgggcgccagtgatttaggcttagaagagtatttcgatggggacggggtttcggtggttgaatggagtcaatttattgctggagaactaccgagcgattatttgacgattcattttaataaggatgttagcgatgatcaagttcggacgttagtacttgatccgcacggcgctcactacgaagcattggtgcgtactagttttgcagactagtgtaattgacattcggcccgcgcaagcagcagatgcgcgggcttatttatgctttctaaaggcggtcgctaaagaaacaccgtatgttgcgttaccagcggagttagccactttaacaccattatttactgaatttttgatagcaagtattcttgaatcgcaacaagatgtattattgcttgcttttgatcaacagcaaattgtcggggcaattcgtgtgaatagtccgacagaacaggggataacacatatcagtgaagttagtatcgctgttttaaaagcgaagtggcatcgcggaattggctctgatttgatggcgcaccttttagcgtcggttcgagaaataggaaatccgcgacggcttgagttaacagtacaagcccgtaatcaccgtgcaattgcactttacaaacggtttggttttgtgaccgaagcacaattagcagccggattttatgcgccagaaacgggctatattccggttgtgcaaatgtgccaattaatgaatatggatgaggagatttaagatgcaacaacaacgaggacgcggaatttacttagccgtattaggatcaatattttgggggattcaagggccagtatcacagtggctattcactgacacggcaattaagccagaatggctaatgggggttaagatggggctttcaggcctatttctattaggttatgcgctcattaaacaaccgaacgatgtttttacagtgtggcggcaaccgcgggactttacgcggatgttattatttgcagtattagggttatcggccgttcagtatttttattttctaacgattcaagccagcaatgcaccaacgactacgattttacaacagctaggcaccatcatgatcatcttaattagcttggtgatttatcgtagagcacctagccgcgttgaactaattgcagtgactgttgcattgttggggacgtggttgttagtgacaaaaggacaactgacacatttggcgatttcacacgcggcattcggacttagtttatgccttggcttttctggcgctttaaacacattaattccggttaagttattccaaaaatatccaacattagtgattgtgggctgggcgatgttaatcggtggggtggtcttcacatttgttcatccattttgggtcggtgttccaccgttgaatgtggcaacaatcagcagtgtcttattcattgctttgtttgggaccgcgctcgccaatctttgtttcttggggagtttacggtatatcacaccgacaacggctggtttattgaatacctttgaaccattagctgcgactatcggtactgttttattcttgaaaacgagtttcaacacctgggaagtcgtgggtgggattctcgtgatcagtacggtgtttatcttgagtcttggtcaatctaagtcaaaataagttaacacgatgaaccgaattgtggtataattaacagcgaaacaaagctcgtacattagtcaaaacaaattaatgattatgatgaagttgttaatcttgtcgaagccctaatgacaatttagctttaatccaccattcgctaaaagagcggttagcctgtctgcatagacaagttaaccgctctttttttgttagccgattaatttggtggccgcttttagcggttcaacgccaaaatcgttggcttctttaatcagaatcttggcacaagcgatactatcagccagtgcattgtggtgattgtcgagtggaatcgctaggttatcacacaaggtgtttaacttatgattctcaaattgcggatacaaccgccgactcgtcttgagagtatccaacgctaaataatggggttctggaatgtcgtagtgttggagtgtacttttcaacacaccaatatcaaaattcgcattgtgggcgaccactaacttgtttggcgtgaaaaatggtgcgatgtgcggccagacttgattgaacttgggcgcttgagccacatcggcttcatgaatgccatgaatttgcgtattgcgactgctaaaataagtttcaggtttaattaacgtataaaaactatcaacgatttgatcgttgcgcacaacaacaagggcaagtgagcaagcactatgccattgaccgttggcggtttcaaaatccattgcgacaaaattcattattttgaacctcgctttttataaagtttgcttattctaagcgaataaatcttgcgtgtcaagttcgacggggcagtggtcggaaccaaaaatttccgtgtgaatcttggcatcgactaatttaggttggagatcattggaagtaatgaaataatcaatgcgccagccggcattattgtcgcgggcgtggaatcgataactccaccaagaataaatatcgggttgatcaggatagaaataacggaaggtatcggtgaagccgcgatttaagagggttgtcatttgccctcgttcttcatctgaaaagccggcgttatgatgattggtcttatcatttttcagatcaattggttcatgggcaacgtttaaatcaccgcagaaaatgacgggtttttgagtcgataaattagcgatataagtttgaaaggtattctcccaacgcatgcgatagtctaatcgtttcaacttatcctgtgaattgggtgtgtagcaagtgattaaataaaaagtagggtattcaagtgtaatcacgcgtccttcttgatcgtgttcaggttggccgataccataagttgcagtgagcggtttatgcttagtgaagatggcagtaccggaatagccctttttttcagcgtaattaaagtattgatgataacctggtaaatctaattcaacttggccggcttgcatcttagtttcttgtagacagaaaaaatcggcatctagttgattaaaagtggtcataaagtctttttttaaaacggcgcgtaagccattaacgttccaagaaataaatttcattgtcgatccctcatttctaaactccattttaacggtctagtcaataatacgcaaaaaaagtgttggctgttcaattcaagccgtctttgttaaactaggagtagattattttttgaggggaacgacaattgtgacaagtcaagttgaagtatttttacaagcaaaccaagcaatcgagattcatcaagcagaaccattgagcttatacacctttaccaaaacaggtggaccggcagatttactcgcactccccaaatctgttgcagaagtgcggcaattagtggccagtgccaatgaactgacattacccatcacaattatcggtaatgctagtaatctaattgttcgtgacggtggcattaaaggcttagtcatcatcttaacggcgatgaatcagattaaagttgaaggtaacttggtgactgcgcaagctggagcagggattattcaaacctctgaagcagcttatagcggtagtttgaccggcttagaatttgctgccggcattcctggtagtgttggcggtgcggtctttatgaacgccggcgcatatggtggcgaaattagtgatgtactgacccgcgttgatgttttaatgcgcgataatcaagtacagacgttaacggccgctgacttagacttcagttaccggcatagtttaattcaagataacggcagtattgtgttggttgcctattttgaaatggcaacgggtgcggcaccaacaattcgcgcccggatggatgaggtcaacgctttgcgggctgccaaacagccgctagaatatccctcatgtgggagtgtctttaaacgaccagtcggtcattttgtcggaccgttgattcaaaaagcgggcttgcaagggcatcaaattgggggcgcacaagtttctaaaaaacatgccgggttcatcgtgaatattgatcacgcaacggcaacggattatttgacgttgatcgaatacattcaaaaaacgatctgggcgaagtttaatgtgcgcttagaaccagaagtccggattattgggcaacataagtaaggttaaatcaatgatgaaaagctatggtaaaagatgattttatcagggcttttttatcaggatgagcgttttaaaaagaaagggtgttgggatggcaattattgaagctgttattttgttaattacgttggtgattattgccaatatcatcgggcattatttgccaaatttaccggttagtttaattgagatcgggttgggattaatggtggcgttagtctttgccgtcaagattccactaaaaacagattggttcatgttggtgtttgttgcaccattattgtttaacgatggccgtcgttttcctaagaaggaactatgggcgttgcgcggaccaattattgggaatgcgattttcctcgtctttgcaacgacgttaattggcggcttggccattcattggttagtcccggcgttaccgctggctgcaagttttgcgttagcggcaatcttgtcgccaacggatccggtggcggtacaatcgatttcagaacaggccgatttaccgccccgggttttgcacttagtgagtggtgaaagtttaattaacgatgccagtggcttgattagctttaaatatgggattgctgccgctgttaccggctatttctcatggcaacaagccgcgggcgattttctgtatattagtattgttggcacactagcggggatgattatcatgttaatcattcattttattcgcctatttatgctacaacaaggctttgaagatgtgatgttccatacgattttacagttggtgacaccgtttatcatctatctaattgttgaagatctattccacgcatccggtgtgattgcggtggtggtagctgggatcatcagtcattcatcacggaatatcttcctcgattttttaccggagttgaagttagtgaccgaacaaacttggtcaatcagtgtttacttattaaacgggattgtctttttaattttagggattgaattacctgtcgctatgcataataccgtgcataatccgctgattaatacgagtgaagaaattctcctcgtcttagcggtttggttgattctggtgattgtgcggggactctggacactagcttacttgctctacaccaaccagacgaatcccaaaacattccgcgaaaacattaaaattgcggtgctctctggactttctggggttcgtggagcgattacgatggccggggtattatcggtgccaactgttttagcggatggttcaccgtttcctcaacgcggcttaatgctctttattgcggccggcgtgattattgtcagtctggtgatggccgttgtcttaattcctaagctgacaaaagtcaaagcaccaatcgagatgcgagggatgcaacgagatcttgaagccgaagcagccgcagaagatgaagcagctgctgatttattggatgaaacaaacgctaagatttacatgtacaaagtagcagcgagcatggtcgaatcccaacggcatattgataataaccgggctgctttagatttattggcagagtatcagttgatgatccgccggttggagagtcaacaaagcgaagcaagcacaagtgacgaactaccaccgttaattgctgaagagttgattttgcgacaagtggcatttgacggagaacgtcagaagttagagttgttatgggctgaaaaggccattagtgctaaaagctatcggcatggtaaacgtaagttacggcaaaaacaagtaatgttatcggttattgggacgagttttaattggcatcatgtgcaactacaagtctatcgtgcttggtcaatcagcaaacgctttttgatgcatctctggccgcggcataccaaatcaccaagtgaaaccgagtggcaattgactgaacgtgaaatggctaaggcgggaattaaacaattgtcgtatttcctaaaacagcctgaaaatcgccaacgtcattataatcgtcaggttatttatcaaattattgtgcggtatcggaatcagattgaaaacatgaaaaatggggggcggagtaagaccgctatctatgaacgtcaattacaaaaattaagaatcaaagcgctcacgagtgaacgagtggcgattcaagagttattggaacaacataaaatttcatggcaacttgcagatgaattacgcaaaaacattaactattccgaaaatgcactgattttagcacgaacggatactgaatagattcaaaaaagccccacgcactcattttaaattgagtgcgtggggctttttttgatggttagaataagtggcggcggcggtagtatttgtagctgtaataaccactaattgcaaagccggcgctgattagtgaaatcgtcaaaccccaatagaaataaggtggccagtatttaagggtaacggtatggtgaccttttttcagcgggatggcgatgaagttcttcaagccgcgtttgattttaaccggatggccgtcaaccgttgcatgccaaccagcagcataggggacggttgtcatgaggacttggttttgttgaggaatggtgatcgttcctttgatggttgtgtttgagaaagtattcagtttcaatgcatgtgcacgaagttgctgcgttaggtgcgtcaatgcttgataattcaaactatataaattaatattttggagccaaatttcctttttagagaagctaaggtcaacggtttgttgttggccgattgcgttacttgtcaggtttaagacgacagtatcgcggaaagtatcgtattgttgtagcgtgtgaccgtttaatgagacctgaaccgcatttttttcgaggtttgagcctaatgtgaggtaataggggtcactcgttgtgggtgtgaaggtatagatgacgtgagctggattcttcggatcaacccggaggaaagtttcgttgagttttggtttttgtttagcattcttgtaagtgacagtattgaaaaattgaagtgtgaagagtggctgttctgtcgctgaattgactaagtctgccgcaatctggttctgttcaaggatgggataattggcaaccacatgatgtttaagcactttttcagaggccgcaaagcctaaatcaagtgcgttggggttttgataaattgcaatttgatctttttttttgagtaagttataacgtgctaagtccggcttattcgtactgagtggaattgttgcttgcccactagtattgttaaggtagtagcgataacctaataacgcatcggtgaacagggtctgattagtatcggcaacggcgccatcgccagctggttcgccaatgctgcccatgaatttcggatagctcagttcgagcatcgaattaaaatgagatccgccgaaataatcagcttgcatcgggtcattttttgtccgcataaaggttttgccaattcgttgaaacgcggttttatttggaattgcgctaatggctgattgtaaatgagctgtataatctgcgtaatctttttgtgagacatagctaatttgattaagactcattgtcgcgttggtgaccatctcaccaccgacgcatagaactaagagcaaaggataatagcgcttgagcggctttttcaggagtaaaagcaagcatgtcatcagtaagaaagcgatgcttaagttaatctgattaggacttagcgcggtgaagctcttgagatgtttggcagtataaccaaaagccgccatcaacattaaaaacggcaacaagagttgataccaactaaatcgggggtgctggtggagccgttgaaccgcgagcacgattagccaaaagctaaccacatatgaaaagcggtaaggataccaaaccggaaattgcatgccgtgccataataaatcaaggggttcataacacattgaaacacctaagaaaatggtgactaataaggcaactaaccgttcttgccaggcaatcttgcgtgttccaaaatacaagatggcacaaatcaatacgagactgccgacgaatatattcggttcgccttttggcatttggtcgaagttaaaattgccaatcacaagtttagaaagcatcttaagcggattatattcgaacttccaatgaatcttttgaatggtgtactgccctttgctctgcgtcaattggaaaaaagttggcaataggagccaggctgagagtaaaccggccaagagtgagccactgatgaagcgggcagcgcgttgccatagatggcgccaagtttgccaataatgagcacaagcccacgcaaaataagcaatgacaaacaggcaaaccatatagcccatataatagttactcattaagagtgcggcaagactcaatggataaagccaaaagtgacggcctgtaaagagccggtcgatgcctaagacaactagtggaagccagacgagtgcatccaaccacataacgttaaactggttggcaattgcaaacccggataaggcgtagacaacactaagtgtcggtaaccaccagctatggagtagtttgttagattttaagtagtacgcaaagctaagaccactggcgcctgttttgaaaaggacaagcagccaaacaccaaaactcaaccaagttcctggtgtcaataggacgattagattgaatggactcatcaaatagtaagcccagaccccaagcatgtcgccccctaagcccttagcaaaggaataaaaaaaagtttcgggatggtgcaatagcgtacttctgaaaaaagcgtaaaaatcgatgtattgttggcctagatcaacagtcaggattgtttgccctccaaaagggaacacttgtcgaagtagtccgtagataaataaaatgccaaatggtagtaagaaactaaggcctaatgtataatgacgacgtgcaaaagcgtaaaatcgactcacggtaatcctccaattaataaaaaaatctaaaaattaggttgctagtccgtttttaactgagaaaagctgtaaaatataaccagttaatgactatgcttaagcataccataatctcgtttgaatttagagatttggcatagcttgtttaagataattttgctaaacttaaacaatacagcacaaaatcgctcaaaaggtcgcttggcgactttttgaagcatagagcggcgccatcttttactagagcggcgctaaataaggagtatctgaccgtctgtgaaaatcattaagagaaaaaacaaacaaaatcgtgaaaaatcactgattccattccgcttaaatttcctattattcgttgtcttcgcgttatttgccgcgttgattatgcaattgggacgcctgcaagtgatggagggcgctaattttcaagcgatggtcaacagtactgataagaaaatcgttacaggtaacgtgcctcgagggatgattctggattcaaagggccgtgtcttagttgggaatactgctaaaccggcgattacttatacgaagaatatgaatgtcttggcagacaaaatgtatgcagaggccaataagttaacccaatatttaacggtcccgacggataagttaactgaacgtgatcagattgattactacctcagtaaccccaagaatcttaaaaaatggaacgcaaaactgcctcaatctgcgaaggttgccagtgatggttctgagttgccagaaaagaaggtttatcaatcaacaatcgaattggttaaaaagtcgtttaaagggttaaacgagcaacaaaaacaagccgctgcgattttcaaaattatgagtggggcttatcaattatcgacagtttatattaaaaatacggatgtgactgataaggaaattgctgaaatcagtgaacatctaacgagtttgccagggattaatgtcagcaccgattgggaacgggcttatcctaatggcgattcaatgcgcagtattattgggcatgtttcaactgaagagcaagggttaccagaagatggcgtcaactccttgctagcacagggctattcgcgtaatgatcgcgttgggaccagttatttagaaaagcaatacgaaagtgtcttgcatggttctaagtcgcaatcacaagttgaagttggtgcgaataatcagattctctcaagtaatgtcttatttaaagggcaaaaagggagtaatttaaatttaacaattgaccaagcttatcaaacgcaagtggaagcggctttgaagaaagtctatgatcaggcaaaagcagcgggagccactcagtattctgatggtgcctatgccgtggcgatgaatccgaaaacaggtgctattttagcaatggctggcgaatccaacgatcgtaagtcaggtgaaattgccgatgatgcgctcggggtgattaatcacaccttcgtcatggggtctgctattaaaggggcgaccgttatggggggcttaatggatggtgtgattacgccaaccaataataccttaccggatacaccaatctatttaagaggaacgccggttaagaaatctgtttacccagttgggacgtttggatcattgaacgctgaatcagcgttggaagtttcttctaatatttacatgatgcaattagcgatgttagaagggcatgccaaatatgtacccaattcttcgttaacgatggattcagatatctttacgaagatgcgtggctacttcagtcaatttggcttaggacaaaagactgggattgatttgccaggtgaagccaccgggatcgaagggccaaccgtcaatgaatatggcgagccagccaatggttcattacttgatttatcttatggtaactacgatgcctacaccttaattcaattggcacaatacatttcaaccatcgcaaacggtggtcaacgaatgaaaccataccttgtggattcgattcaacaaactggtaacgatgggtcagctggccaagttggtaccaagaccacgccgacagtgcttagcacagttgatgcgcccgaaagttactttaatgtcgttaaaaaagggatgtacaacgttgtcaatgggaccaacgcttgggggacagcacacaccttgaaagatattaaaccaacgcttggcgctaaaaccgggacggcacaatcatttgcccgtgaagatccaaacgattcgacaagtaagcaagtcgaaaccgttacttctagtttggttggctttgctccatacgataatccgcaagtggcaatcgccattgtgttcccgaacttaaactctgataaagggcactacaatacgttactagcccgtgaaatgattacgagtttctataaattaaataacattactgaatgaaatattccaaaataaccttttcagataccataaaaaatggtatgatactaagagtctaagaattaaacagttttttagaaatttacttacagcttggaggctatatcaatgcgtgttcacattacaatggaatgtacagaatgtcacgaacgtagttacttatcaaacaaaaataaacgtaacaatccagatcgcttggaattaaagaaatattgcccacgcgaacgcaaagtaactttacaccgcgaaactaaataatagtgacgcacatcaaaagtcggggcgcttcgcgctcgggcttttttttgttaaggaggcttttgaatgcggactaaaaagcaaattcggcaacaacaaattgcggcattacaaacgcttgcgcagacgcctgcgcttaaacatgctcaagaagcacaacttttggaattgttaatggcaaccgaggtgtttcaaaaggcaacaatcatcggtgtcacgttgagtcagccaattgaaatggcgacccagccggtaattgatgccattcgtttggccggtaaagaagttgtagtgcccaagacattgccagagcgacaaatggctttttacccgttaacggcaaccactgaattaacaacgagttcctatggtgctttagaaccagtggttacagctggtagccaggtgttaatccctgatttaatgattgtgccgggactagcatttagtccagaaggttggcgggttggttttggtggcggttattatgatcgttatcttgccaaatatccaatgccaactgttgcactagcgcttaaaccacaacaacgaagtgctgattgggccattgatgaattcgatatccaactcgatcaggttcttcaggtctaaaggagaaaagatgactaattttaaagaacgttggcaagacgcaccgattgtggtgtatgccttgatgttactaacgattttgatgtttgcaatgatgtttttgaatccggttgtatggttgaacggctttacatcggttaacatgctaatgaatggccggattattgggtttatgatggcatctgtcaatcatggccggtttatgaatctcttcgtagatttggttattttgttttttgttggtggacaacttgaacgattattaggacactggcgcctattagctatctatatactgagcagtttagcgagtttgtttacaacgggcgctttttttggtctcgatacaccaaccgtgactgctggaacagctatcttagggctattcggtggcttcttgatgttaggtgatgcctttaaagaagaatccgtgctaggacaagtggcacgccagtattggctgtttttatttttaacaatcggattacaatttattgtcgatcacaatgcattgtacgcaatggtaggtggggtacttggcggctttttaagtagtatggcgctgggtgcacctaaagtgggtaagattaacccgctgaaccgtgtggtgagtgggttaatttatgttgcaacgatgattttatttggttttctgggtatgaatcattaatcaatttatgtataatgttaaaggtgaagttgatgagaactctatatgatgtacaacaacttttaaaacaatttggcgtttacgtccatcttggtaaacgactttgggatatcgagctcaccagtatcgaattacggcacgtttatgatgcggggttaatcgatggcaaagtgtatcgtgatgctaagatggttttagtgcgtgaacatcggttggagaaaaatgaagcgtttaatcacaatttattggaggagaagtttaaatgacagacaagaagttaatcggcgttgatttaggcgggacaactgctaaatttgcaattatgacaatggatggcgaaatccaacaacgctggagtatcgatacggatattttagatgaaggtagccacattacaccggatatcattgaatcgattaatcatcatttagatttatataacatgacacctgctgatttcatcgggattggtatgggcacacctggtagtgttaacagtaaagaagggaccgttattggtgcttacaacttaaactggaagacaacccaatacttacgtcgcgatatcgaagctggcacacacatgaagcttgcaattgataatgatgccaacgttgctgctttaggtgaacgttggaagggtgctggtgaaaaccaacccgatgttgcttttgtcacacttggcactggagttggcggcgggatcgttgctgatggccatttattacacggtgttgctggttctgcaggtgaattaggccacgtaacagttgaaccacatggttatgaatgtacgtgtggcaaacaaggttgtttagaaacttatgcttcagcaaccggtgttgtgcgcgttgcacgtgacatggctgaagaatacgctggtaattcaaaattaaagacaatgttggatgatggtgaagaaatcagctctaaattagtttttgacatggctaaagaatcagatgcattggctgttaaggttgttgatcgtgtttcttactaccttggtttagcattagctaacgttgggaacatgttgaatcccgcttacatcgttatcggtggtggtgtttcagctgctggggaatttttacgtaaacaagttgaagcttactttgaagaatttacattcccaaatgttaaaaatacgactaagattcgtttagcaaacttaggaaacgtagccggtgttatcggggctgcttcacttgcacttcaatttgatcaacaataatttgttataagggagtcttatcgatgcttgtattagggacaattaatgtatgggtagtaattaatattattctgatcgccattttactttggttcttgggcgattgggcatattatcaaattcaacgcaaacgcttaggcggcgaattaacggaagcggcgtttgaagaaacaatgcgcaaggcccaaattgtcgacttacgggataaaaaagattttgatgcaggccacattttaggcgcccgcaacttaccttatccaatgttgaaacaaaatatgggtgaactacggatggacttaccagtctacttatatgatgcaggcattacgctcagtatccgagcagcactgaagttaagaaaagctggtttcaccgacattaaatggttgaaaaagggttatgctggttggaccggcaaaacaaagcgtaaaaagaaattaaattaaaccaaaaaagcccaagagttactagcgaaaaaaactagtcaactgttgggctttttatagagtgcgcaggcagatggtcatactctgaggattagtggcataccgtaaatgagcggcagagccgatcgtttgcggtatgtaactaaccgaaagagtatatctggcggcgcacgtttcaaaacagagtgcgtttaaagcggtttgactctgagcattagcatagtgttgttaatgaccgacaaagtcggtcgtttgcaatacgaagctaatcccaagagtcagctttaaaaagcacgtttccacaaaaaaagtccgtcgccaatcaggcaacggacgcagtcttttcaaagcgcttagccttggtgagctgaatggctcttacggttagcacgtcgacgactttcttcaatttgattttctttttcttcgattggatcaacgacggtcttcttaaatgccaagagtgaaccggcaatcgcgccgactgttgaaacggttccgattacgaaaccttttagaaatttatgtttcataggtaaagcctcctcaagtctcaattcattcaagtacaactttattatcgcgtatttaagcgcgaatagctagtaaaatacgttaattaatgtggtgaaaatatggaaaaagaaaagctaatcgtcattgttggtccgacaggcgttggtaaaacagcgttaagtctacaactcgcacaacagttgcaaggtgagattatttccggggatgcgatgcaggtttatcgccagttagacatcggtacggccaaagtcacaccaaaagagcaggcgcttgcgccgcaccacttaattgatgtggcggatatcgatcaacgcttcactgcctttgactttcaacagcaaggacaacaactcgtcactgaaatcgtcggccggcaacacatgcccttggttgttggtggaacgggactttatttgcaggcgttactgtacgatatgaccctgggtagtgcgcaagatgcggaacagaattttacgattcgtcaaaaatggcaaacttttttggatcagcattctgaagaagctttgtggcagatgcttaatcaaattgatccgcaagcagccgctaaaattccgagtgcgaatccacggcgtgtggttcgcgcattagaggtttatgaaacaacgggaactttgttttcacaacaaaagccaaaagaattacgttatgatacgtttattattggattgaattgtgaccgtgcattattatacgagcgaatcaaccagcgggtggatcaaatgatcgatgctggacttttagaagaagcgcggttggcttatgcacatcgtgaaacgagtccgcaagccgtgcgggggattgggtataaagagttcttcccatactttgatagtgactgttcattagacgtggcaattgctcaagtaaaacaaaattcacggcactacgcaaaacgacaactaacgtggtttagaaaccagattccggtcaattggtataatctggttgaacaacctgaagccgatttggctcggattcaaaccgatttacaacaatggttacagcaataatagaaatggagtggttaaaaaatggattggcaagcaaacttagcaccagaattacaagctaaaatcgcagcagttgatacgcaaatcgcaccgcgtttacaagcactggatgaacaaatcatcaataatcaagcaaaggtgctcgaagcgtttcaagcagaaaatatttctgaatcgcatttaaacgggacaaccggttacggcaacgatgatcaaggacgcgataagttagaggccgtctatagtcacgttttcaaaactgaagatgcgcttgtgcggccgcaattggtttccggcacacacgcgattggaacggccttattggggatgttgcggcctggcgatgatcttttatatcttacgggcgaaccatatgatacgttgcaagaagtcatcgggatggccggtaacgggattggttcactaaaagaattccaaattggattcgattttgtgccattattagctgatggtgccgtggattttgaaacggcccggaccaaaattacagctaagacaaaagtggtcgctatccaacgttcacgtggctatgctgatcgcgatagtttcacggttgataaaatcaaggaaatgattgcctttgtcaaaaacattaaccctgaattgattgtctttgtcgataatgcttacggtgaattctctgaaacaacggaaccaacagaattcggggccgacgtaatggccggttctttaatcaaaaatgctggtggtgggattgcgcaaacgggtggttacatcgttgggactgaaaaattaatcgaaatgattggttatcgcctgactgtgccaggtgttggtgccagtgaaggcgccacacaaggcaatctgcaattgatgtttgaaggtttcttcttagcaccaagtgtgactggtaatgcgattaaaggggcggtttttgaagcagcgcttttggaacaaatgggcttgagtgtctcacctaaatgggatgcccctagaacagacttgattcaaacggtgaacttcggtaatccggatgatatggttaagttcgctggttgtgttcaagcgcaatcaccaatcgattcatttgtgacccccattccaagtgattttgccggttacgaagatcaaatcgtaatggctgccgggacctttatccaaggtgccagcatcgaattttcagcagacggcccattgcgcgccccatatacactttacttacaaggtgggttaacttacgcgcacgttaaactcgcgattagtcgggcagtccaaacaaccttctttgaaaaataaatgccaagcggtcaatcaaattcgcgtttgattgaccgctttttttgtgcgttaagcatggtatgataagggtgcaacgaatcgtagcggtcggttttaagagatgctttggattgttgctagtataaatgtgtcattctcgctacggtaagtcttggaggtggttagatgttaattggtcaacaattaaaacaatttcgtttggatgcgggctactctcaacagacactcgcagagcagattaatgtgtcacgacaagtcatttctaaatgggagacggataaaagtgcaccagacttgaatacattggttgttcttgccaaattgtataatgtaagtttgaatactttgctcggggttgaaacggtcactaaaccgaattcattctttgggcggttgcggcaacattggcatttggcagaaagcgaaaatacaaaaccgctgtccgatttaggacggattatgcaacaacccgaacaacactatgtggatttagcacaacagttcagtgtcactttgacggatgtaactgttactagtgatggccaaacaatgccagcgaattggcggcaagcacggagtccttatttaattgtattagaaccgcgccaaatttgtttaaagcagacagatgttttaaaagtcatgcccgcaaaagttgttaagcaacttgcgacaacggaaattcgaacaattcattatgcggtcatgcagactgctggaccatcaaccattggcgggttacaaggtatcgggcacgcttatcgggccatcgtgacggttgatacaaagcaatccgtagcaccatactatattaccaaccaggattttcttcagttggcaaaagttctgaaagcttatgcacaacaggaacacgttcaatttgatgatcagatggctttgctgccttattttatgacgcatgacacaactgactgctttaattatttagaggtacattacagcgaattagcggaaaaagttggggttccagcagaaagcgcaggacaggcggtttatcgatggtagatgaaacagcaaaaaacaactttgaaacggcgacagatggggttcaggcttatcacaattattttggcacgccaacgcacgatgatcgtatttggtttgaactcttaacagttggggtcttccaagtggggttgagctggaaagtagctgcaagtaaaataccagttctgcgacaacaaatggtggggatggtgattgatcaagtcgcacaatttgatgaaatggatgttgaacgcctgcaaaaagaaccagatatgattcgtaatacgcgtaagattcgggcaacgattcaaaatgcgcgggcaattcaagccatccaaactgaatatggcagtttttcagcgtatttgtgggcgtttgttgatggtcagccgcaattgcttgattcacaaatggctggcgtgtccgataaatcagcgccgatcagtacgcaacttgcgaaagagttaaagaagcgccagtttaaatttgttggaccggtggtaacgcatttgtttatgcttgcaggtggtttgattcaaatcatcgatgaagactaatgcctaaaaggtaaaccaaattggtttacctttttttgttggctgatgttagaaaatctgacatcaaatgttgaccgtttgaaaggcgactggtaagataaaacgcaagtgaggtgaaatggatggctgaaaaacacttaaggcgcaacttagcagttttaccaattggtacggtaatgaaattgacgggacaaactgcgcgtcaaattcgttattatgaagcacaggcgcttgtttttcctgaacggacaacgggccatcaacggttgttttcgttgaacgatgttgatcgtttgttggaaatcaaggattacctagctgaaggcaccacgatggcacagattcgccagatttatcagaagaaggcggatcggcagcgtgataaacaattatcagacgaaaaagcgcggcggttattggccaatgaattattatcggtcggcggcttagttggacaacagtcaaccatttcacaatcatctaaattatattaaggggcgacggattaatggcacgtaaagtattgacagcagaagcaatcaagcaattagtggatcaagaaaacgttaagttcttacgtttaatgtttacggatatcaacgggattatcaagaatgtggaagtaccaattagtcaattagataaagttttaagtaacaaaatgatgtttgacggttcttcaatcgacggttttgtccggattgaagaaagtgatatgtatttgcggcctgatttaagtacatggctcattttcccatgggaagcggaacatggaaaagtcgcgcggttaatctgttctgtctataccgcagatggagaaccattcttaggcgatccacggaataatttgaagaaattagtgcgcgaaatgcaagataaagggttcaaagactttaacattggaccggaaccagaatttttcctctttaaattagatgaatacggcaaaccaacgttgaaactcaacgaccaaggcggctactttgattttgcccccgttgatttaggcgaaaactgtcggcgtgatattgttttggaacttgaaaagatgggctttgaagttgaagccagtcatcacgaagtcgcacccggacaacacgaaatcgattttaaatacgctgatgcagtcgatgcagcggataacatccaaacctttaaattagtcgttaaaacaatcgctcggaaacatggattacatgcaaccttcatgccaaaaccattacacggtgtcaacggctctgggatgcacattaatatgtcactctttaatcaagatggtacgaatgccttctacgatgaaaaaggtacagaacaactttcaaaaacggcttatcatttcttagctggcttattgcaacacgcacgcgccatcacggcaatcaataacccaacagttaactcttacaaacgattagtccctggttttgaggcaccggtttatgttgcatggtctggtcataaccggtcaccattgattcgggtcccacaatcacgcgggttatcaacgcgtctcgaactacggagtgttgatccaagtgccaatccttatttagcaatcgggtcgattttggcagccggtttatctggcttagatcaagggctcttgcctgatgctggtgtggatcgcaacatctatagcatggacgaaacagaacggaaggaaaatcacatcactgacctaccatccacattgcacaatgcattgaaggaactagccaaggatgagattatcaaagattcaatggggccttatctctaccagagcttcatggattctaaatcattggaatgggcagcttatcgtcaacaagtttccgaatgggaacgcgaacaatatttggaactctattagtcgcaatttacgccatgtttttgtacaattaaactttagaaatagaaagttggcagagtatgaaaacattggtgattatcagccatcccgaaattgagacgtcgatggtccaaaactttttaaaagcgagtgcagcaccactggaagccatcacttggcaccacttagatgcgcttgagacgttagatgtggctgctgaacaagcattattacgcaaccatgagcggattatttttcaatttccgctctattggtatgctgctccagcgagcttaaaaatgtggttggacaccgttttaacggggcaatttgcctttaatggccgccaaccattagccgggaaaacactcggggttgtcgtttcaactggtacggcggctaaacattttcaagctggcggcagtgaacaagcaacgctgtctgaaattttgcgcccatatgaattggtggctcgtaagctagggatgacctatttaccaccacttgcgattcatcaattgggttattggcaagaaactgataaacaatgcttggtcatcgattatcaacggtatttgacgcaatccgagttcaattttgatcagcaattagcgtggtttgaagcgatgctgactaaaaaggctgctgaagccacatcgcctgaagcgcaacaacgtttaatgcttttaagcgaacaattcgccgacaaacgatcggaattaaccgatttgaattggcaagtccaactgattcgcgaagaagagggggaaggctaatggattggttaacagaacaaattcaactacaaaaagaacaagccacaacgtatgaagagcaagctttttatacggcgcttcaacaaacgagtgatgaactagcattacggattgaacaacgccaaggtgaacttgatggtcgaatctggaatgcaacgaattggtaaactaatacaaaataaaaaacgccgcgacgaaagtcggggcgttttttatgtaattcgattaatagcgtttgattaatgtatcgaaagcatcaacgattgcttggaagaaaccaagtgtatctgggtttgtgatttcttgattgtcatctaataagttcatgacattgccgatataagcttctggttgttgaaccgttggcatgttcaagaaaacaagtgattgacgtaagtggtggttagcaccgaaaccactgattgcaccaggtgaaacgctgacgatttcagctggtttgttatcccagatgcttgcaccataaggacgtgaaccaacgtctaaagcatttttcaatacggctggtactgaacggttgtattctggtgtgacgaataaaacggcgtccattgtcttcattttatttctgaaagttgtgtaagcttctggtacttgatctaaatcatcataatcttggttgtacaatggtaagtcaccaatttcaacaatttctagattataatctgatgggaataatggcatcaatgatttagcaactgatttgctaaatgaatctttccgtaaactaccaattaaaactgcgatattttttgtcatagtgaaacctccaattgttttacttattattagtaagtaactttagtatagcacgttcccctgaaaaggcaaccacttttacttactaatttaagcatagcgaattggtgaagcttttagcaaacaatatggtcggccattgattggcattggcaagctataaatcgtataatagcagtaagtagaacaaagatgggaaatgaataatggaaattaaatggcacgtcaatcaaccacaatctgttaaacaattcttgctagcaagtggcatcagtcaacgattgtacgccaaaattaaggcgttaggccaactgattctagtaaacgggcaaaaaagtgcgcctagtgatcaggtacaatgcggcgatgtggtcacattgcagttaccagctgaactggccgatgaatcagttgctgttagtcacgaaccaatcactatttgttatgagaacgagtattggttggcggtcaataaaccagctggcttggcaacgattccgggtcccactaatcaaacggatactttgttgaatcgcattaagggttactggcaagcgcagggtgcaacagatttagtaccgcatatcattacgcgcttggattttgatacaagtggaattgttttagtcggcaaacaccaaattgcacaaagtctattgcaaccgcagattgaacagcatcaattacaaaaattctatttagcagttgtttcaggaacgggtttaccagcatcaggggatattcgtgaaccgattggacaaatcgaccatcaaccgcggcgtgaggtgttggcggatggtcagttagcttggacgagttattggcgcttgggtgcatcgggtcagttgacggcggttaaagttcagattcatactgggcggacgcatcagattcgggttcacttcagcgcgttaggctatccattggtgggtgatcagctctatgatgggccgcttgatttagggataacgcgacaagcattgcacgcgtatcgactgcaatttcaagatccattcagtcaacaatcgatctcgattacagcaccgattgcagccgatatccaagcgattctacctacagaacgattaccaattgattgattcaaaggaagatgacaaatgaaaaaatggcaatggttactaatttgtatcttgtgtttcggcattggtggggttatcggtcatgtagcgactggtccaacaacggtgccatcgattattcagccaacttcggccaccgcaaaccagcccgttattttcgtaccggggagtaatggaacagttgaagggtttaatggcacctttgctaaattgaaccgtcaagtcacacgccatgttttaaaagtaacggtattaaaaaatggtcacttgaaaaccagtggtcgctttgatcaaaaaacacaacaccccgtgattgtggttgcgtttgaaaacaatgcagatggtgatgagaacgtctttaaacaatccgaatggtttaaattggcagcaggtaaattagctaaacaataccactttacgcattttggtggggttggttattccaacggtgggcttgtattaacgcggtatgctgagcgtagtggaagtggaccgaagattacacgattactgacgttgggaacgccatataatggcatgtcggagcacatcactcaggaaacaccgatgttagctgatttaaagagccgccggcaacatttatccaaagacttagtggtctattcagtcggcggcacaattaacgataagaatgatgggattgtcccagcagcgagtgttgcggctggtcggctcatttttcaaaagcaagttgctgattatatgacaatttcggtgagccagcaccatgcagcccatactgaattgccggataatccaaccgtcatttcactgattcaacaattgatgtttaaataaaaaaaggtgtgtcgcagcaagttgagctgtgacacacctttttaatactattgatcgattgttttcaagagattccgcgtgatgagcattcccatgatgaagattaaaatttctgttaatgggacactcacccaaacaccggttaatccgaaaaggctagaaagaaccaagacgctcgcaatcaaaacgatgtagccccgcatgatggccacgaaaaatgacaatcgaggttgcgcaatggcggtcatgaataagttattgacgatgttcatgcttgagaagaaaaaactaatgaaaatcaagggaatgccagcagacgcgtagcgaatcagttgttggttgtgttcatggttaaaaatttcgatgatcggtaatttaagaccaatcaaaacgagatataatcctaccgcaatcccgagtgcggaaagcaaaccgattttgagactcgttttgacattatcccaatgatgtttcccaaattcgcgactaacgattggctgaaccccgactgcaacaccgttgaatagggatagaccaactagtaagatgttggcgataatgccgtaagcggcgatggcatagttattactgagatggagaataacaatgttaaagacgaaaatgctgaccccagtactcatttcagttaagaaagatgggaaaccgagttgaattgctttgaacgtcggtttaaaacgtaaggttaagtgctgcaaagttagtaaccgttgtgggtgatgccggtgttgtgtcaaaatgagtaggctgacgattggcgaacaaatcgtggccatcgcagcacccatcatgcccatgtgtagggggaacattaagaggtaatcgaagataatgacgaataagctttgtgaaagtgtcgcaatcattgtcaaatgtggattactatcgttacgtacgaaacttaagactaagttattgatgataaataagggactgccaattaaaataattcgtaaataggtcaagcttggggcgagcgtttcatgattggcacctagtaagtggagtagtgggtgaataaaaattaagccgagcgccatgatgatgaggcctaataaaatcccaaaagaaagaacttgagtgaaaatcgagcgactcttttcgggatgcttgctcttgttaattgagaaaatcgtggcgcccccaatcccgagcatcagacctaaaccgttaaataagttaaaaatgggcagatcaatattcaaagcggccaagccaattggtccgactgcgtaagcgataaaatatgtgtccgctaaaatatagatggataagcctaacgagctgaaaacgtcacggatgatgtagcccgttaattcttttttgatatgtggtgagttttccaaaataacactcctattcgattggtagtggggtcgccattaataacgcaataaatgattggattggtgctggtaaattcttccgggcgacaaggtagaattggcgttgatattgttgggacaatggtcgatagggaatttctgggtaatcaagtaaggctgcgctagaaactaatgattggccgataccctgtcttaatagttggataatcatcgcattgcttttgatggtcatcacgttttcgagtggtaaattattttctttgacgtaattcatcgtgtagtgatagacgccagaaccctgttcacgaagtaaccaaggttcattcgggcgacctgctaggaccagttgatcggtctgtagtggcgtccgaattaagtctttttcggttaatggtttttcaatgaaaccaaagtctagtttgtgctgcgtcaattcttgaacaatctgcgatgagttgagtgtactgatatctaaggcgagtgtttcaagggctggccgatgcgctttaagcagggttggcaataagtaggttgcagtggtgtgcgaggcgccaattcggcacggtgtttttggctggccatcttgatgatggagtgcgtgcaaatcttggtcccataaatcaagaagttgttgtgcttgttggtagaagagatcagcactcttagtcggcgtcatctgctggcgcccattgcgttcaaatagtgtgacccccagcgcatcttccaattgtttaatttgcacagaaacggtcggctgcgatagaaaaagcagttgcgcagccgttgtaaaattcttggtttcataaacggttttaaaagttgttaaaattttaaacatatcatcacttctattcgttatcttaataacaactattataaagatttattttattaattgaaagagtttcggtatagtttaagataacaagtgagaaggagtaaagcaatggacaatataacaaaaaaaatacctggctttgcgttatcgttagcgattgcgattgccagttattacatcgctaaattatggttaccaatgttaggcggcgcaacgattgcgctttttgtcggcatcgtacttggcaatacttggttgcaacaaccggtattagcagccggaactaagttttccgagaaaaaattattggaatattcagtcatgttactgggtgcgacaattacattccaaagtattcaacaaatcggctggcatggtgtgctgtttaccgtgttacaaatgagttgtacgattggatttgccatctggtttggccgccggttgcaatttagcgaaggtacctatttattgatggccggtgggaatgccgtttgtggctcgagtgcgattggggcaattgcgcccgtcatcgatgccgataacgaagataccggcattgcgattacattggtaaatctaatggggaccatcttgatgttactcttgccagttattggaacgttgatgtggggacataataatgaactccgtggcgtgttaattggtggaacagtgcagtcagttggtcaagtggttgccagtgcgacgatgattaaccaaggaacggttgtcacagcgaccttattcaaaattttacggatcatctgtttggtttttgttgtcagcggttttggttacttacatcaaaagaaacaaagtaaagtcagtgatacaaaactgagcgaacaattattagcgaagaagagtagcttagtgccatggtacgtgattggcttcctattattctgcgtcttaaatagcttacgggtttttccaagccaatttggtacactgtgccatttcttgagtacatggtgtgaaacaacggcgttagcagccattgggttacgcttgaacttaaaggcactcttcagccaaggtaaacgtttattagcatatgccggcggattagtgaccgtacaggtagtcctcgcgattttattaattacactattattctagggcgtgtcagcagctaggatgtttctaggaatattgaattattaaaaaatctgccatcaacaattttgttgatggcagatttttttgttattaagcttggtaagtgccgacttgaacggcttgttttaaagtggctggtgtgtgatgtgacttggcgaaaaattcgcttaaatcacgtccggctgttaaacctttaaaatgtttgccgccttgccaaggggcgattgcggaaaggtcataaacgacgccatcaacggcaacgtatgcgggttgaccatcttgaccgttatattgagcgagtgtttcttttgtaaagactttatctgtcatgattaaaaatctccttcgaattgtgaatgggttaccaataatatagcgctagatgcagaagttggcaacgattaagttgtgcactttgaaaatgaataatgttgaggctagcgaattagagaattattcgtgaccttaaatactgttcttcaaataataatttgttaaaataatcataattgggggggatgaaaatggacaataaaaaagactggttgatgcgacaagttgattcttttgcggaaggaatgggttatttgttatcgaaacaaagtggtaattcacagtcggaggttgcctttccgcaagaaaatgctaaaaaattgccttttcaaaaggaattgacaagtttaattgctgccaacgatactagaggggccgcccaacgattattaaaattacaatacgcaatgcctgaagaacaatttctacagttaggtacatggttgttattagaaatgaagcaggacagttttcctaatcctttaacccgtgaagcgctgacagacgttttaaatacgattaattaaataattgaacgaaaaaaccaccctaataaataatagggtggttttatttaatattgatggacccgaccagattcgaactggcgacctcctacatgcgaagcaggcgctctcccgactgagctacgggcccaaacgcttacaaaaatattttagcacttttagctaaaatagcaaggcgaattagtgacgggcagatgttctgaggttatttgcttttttgccacctttagtcgtgcgggttttgaagtgggcttgttggctatcaggaacgaacttgaagtgttgtattttcccggcatatggttggccactgaggcgaatcttcaaccaatcttgcatggcttcaatcattccagtcagtttttcggcttgttcagaatttgcttgtttttggacttcggttgtaacatcgttagtgagataagccaataatttttgatgataggcaattagttcttctgtgagtggcgcttggttatattgattgaaaagtttttgaacaaaacgcattgcatctttagcgttttgtggttggtaaaagcgatcttgatcagacatagaatttccctctttcttcagagtagtataacgaataatagtgctcgtcacaaccgtgtgctttggtataatagagaaatactagtttttcggaggtcagcaatgtttaaacgtaaaagtgattggttcttagtggctgcactggtgatgatggcgatcttattttacagttcttcaatgacgtatcatgaacaaacatcggtgcccactttggaacgatttctcaagaatgaaccacttaaggcttggttaagtcaattttcgttccattatgcaggcagtgaacagagtgtaaaagcatctgggtatttcaaatttgtggagtttttcgtgcgaaaaggcgcccattttgggacgtatttcttattggcggcttttagttatttagggctacggccacgcgtaaccggtggttttttagcagttatctttagttggctggcagcaaccgggtatgcggccacggacgaatttcaccaaatgttgactggtgatcggacgccactttttcaagatgtgatgttggacagtgttggcgcattaacggggattgtgattgtttgcgcactacagtggatttttacacaaaaaaagagacgatagcccgactatcattgcttttagcatggtaatttgctatcatagaaaacgacttagtaccagaattctataatcgaaaagaggagttagatatgtcaggacattcaaaatggcataatattcagggtcgtaaaaacgcacaagatgcaaaacgcggcaagattttccaaaaactatcccgtgagcttttcatggctgcgagaagtggcggtcctgacccaagttctaacgccgcattacgtttaattatggataaagcacgttcagctaacatgcctaaagataatatcaaacgggcaattgataaagctgacggtagcgatggcgcgaactacgatgaaattacttatgaaggctatgcaccaggtggtgttgccgttttagtgcacgctttaactgacaataagaaccggacaagttcagacgttcgtgttgcatttactcgtaatggcgggacaatgggtgcttctggctcagttgcttacatgtttgatcgtcgtggttacattgcgattgcacgtgaaggcttagatgttgatgaagatcaaatgtttgaagacattctagaagctggcgcggatgatttacaaactgaagaagacgtgtttgaaatttacacagatcctaaggaattagcaaatgtccgtgatattcttgaaaagaaatacacattggcaaatgctgaattaacaatgattccacaaaatacaacaccggttgatcctgaaaaagcagaacaattccaacgtttaattgatgctttggaagacaacgatgatgttcaagaagtttatacagctggcgaactaccagaagaagactaatttgtttgataagtgcgttgcaagtaattgcaacgcactttttttgtgcagaaaattatccggttatttgcgtatctttggttagtcaggaaggagggacgagatgaccgaagtattaacaacccttttgcaaaagtgcgcaacggaaaaagcgcaggatctttattttcgaccactatcgacgggttgggcaattattgaacgcttagcgacaggactaaagccgttacaaaaagttactctgtcagaaggcaatcaatggctcaatcaaatgaagtatcaaggggggatggatatcagtgaaactcggcgtccacagaccggccgttcagcgatcgaggtggcaggcgaattgatttatttacggttggcaaccgtgggggattttttgaatcgggaaagtttagttgttcgtttcatttatcccattgggcagacttatcattgcgacgactcgcagattttaagtcgtttaatgcagttaattcagcaaccaggattattgctatttgccggtccaactggttcagggaagacaacaagtttgtactatcttgcggaacaagtcatgcaagataagatggtggttgcgattgaagatccgatagagattcaacagccagctttcttacagttacaggtgaatgaagccgcagggttaacctatgcagcattgttgaaaatcagtttgcgattacggcctgataccttaattattggtgagattcgcgacttacagacggcccaacacgcggtttctgcggcgttgagcggtcacttggtactaagtacgattcacgcgcgaagtacaacgggggtgatggaccgtctattagatcttggaattagccactcacaattaaccgcttgtttagcgggtgttgcctatcaatcactagtggtcgaaggccacaatgtagcggcccactatgagttagcaactgcacaacagttggaggaggctgttcatgaagactaaaaccactgttcaattcaatactgaatttatgttgctgttagggcgcttactgcaaaatggtttttctttacaacaagcacttgagttcatgccgattgtttttccgacacaaaagcagtggctgcatcaggtgcaaactgggttagaagcaggaaaacgactagcaccaagcttagcggcggtttcgtttccaacacaccttgttgcacagattgaattgactgagttgcagggaaacttaggcgagtgtttgttacatcttggccaattacagcgaattcaacagaaacggcgtagagagttagttggcgtaattgcctatccctgttttctactcctttttctcggggcgttgattgggatgatgcagatttatctttttccggaaatcgcgcagtttaacccaacaacttcggcgacatcaccattacaactattttttagagtgatggggacattcgttattatggctggtggtctgattagtgtgtatttattccgttggcatcggcgaccgctattacaacgattggcggcggcatttagatggccgttcatcggtaaaacgttgcaggcttactatcagtattgcttattatttgatttagcgacttgcctgaataacggcttaaacttggccgaaatgcatcagcttacacatcgtttggcgaaaacatcgtggcttgtacaattaatgcaacaacttgaaacggctgtccaaaaggggggcacgctattagcgaacttagcggatggcgttttttatccacctgagctgcaattagtgctcgctaagggaagtccgttacaacagatggccaaggaggttgatctgcttgcagtcattaaatacgatgaactgcaacggcaattgaaacagaaggtgaattggctacaaccgctcttgtttatcctaattgggatcatcattatttgtacctatctcagtattttattaccgctatatcatacaatggagggaatttcatgaagaagaaaagaaatgcatttacattgatcgaaatggtcgttgtgctagctgtgatagcaatgttagtcttgttaattgcacctaatttaatgcatcagaaagagacagctgagcaaaaaacggatacggctctagtggcaacgattcaaacacaagttgaattagctgaggatgacggtaaaacggtgtcgagtctagccgatttagcatcaggtgaaaaatatttaaccaataatcaggttaaacaagctgaaaaacgcggcataacaattaaggataataaagttgttcaaaatacaaaataaggcgttcactttaatcgagagctgtcttgttttgttcattgttggagtagtcagtttatttgcgttgcaacatattcgagattatcgtgcacggcaggcggagcgtttattttttgaacaatttgaagcgtcttggcatgcgactcgcgaatatgtcgctgttgagccgcataatgtgcacttatcttgggatcaaaccaaccacgcgttgcattacacaagtgcggatccacaataccaaagtatggatatcccgattccagaaacattgatgtgcgtcgatccagaaacatggtttaggattcaatttaatcatgactcagctgctagaccgcggtcattgatttgtcggtctaaaattgatgggcaccgttatgaatatcgggtccagatgatgtgggggatgttacatgttaagaagtagaccggcatttctattaatagaacaaatcgtggcgttaagtcttctcctgatgggaggcttgaccttgacaatgagtctacggcagtttaaagcacatcaagttcaacggcggtgtgctactacagaatatgctgtaatggcaatggctgccaatcgattggcaaatgagcagccgccacaagcacaatggcagttgcaacgggaaacataccaagtcgtcaccaaaaaacaggccatttatgtcacaaataaagcgggtgagcgagttgcacttcaatggtattgttactaaacgctctggatttacactgattgaaatggttgtagctctcgttattctgatattgagcagtcaattaatattggcaaccactaaaacactaacgcacacaacgcaattaacccagatggaacgtcagaatattaattggcacattagtatgattgaacttgatcgttttctggatgacgctcaatttatttcaattgaacaggcgaattatgaacagcaattaaccgtcgctaaagattcgaaacgacgctataccttaacgaaaactaagaaggaactggtggtttcgagtacgaagaatggttatatgcctctgtttgatggggtctcgcggttaaaaatggtgtatcatgaaccttttttagaactcgaagcgcgcttaagcgatgggacagcctatcaacatgaatgttttttggaggcgcaacatgacacgaaaaatacagattaaacgctctgcagtcgcgctcttgaatgcagttttgatgttgagcttggtgacaagtgcgttgttgattgtgacccacagttaccaacagcaacaacagagttacgtcagtttgactaactattaccaaacgcaaatcttgcttaaattaacaaataaagcgcggcaaactcagttaattcaaggtataaagactaacatcggtaagagtcgtatcgaccagcaacacaagttaatcatcattgagttaaacaatggttatcgaaaacagtttccagatcagaatgaaacagatcaaggataaattttctatttgataaagcgcttactatgatttataattctaggtatacccacctgtattacttgctttgccgttagaataccgatagaatataacaggaatctaatgaatagaggtggctattttgcctaagagtgctgtagaaacgttgtttgatcaactcgatcaaacaacacaattaattgaaaagaatttagaaacaacctatttggatgcactcaccgagaccattgctaatattgcagatggtggccgcgtaaaggttgaagacggcttaccagatgctgccactgttgcacaactagaaccgctttatgcggcggttaatctcaaccaatttgaagcagaagaaattcgccaagcattacagttggcaacgctcaagggtttgcgtcaagttaaagtggaaccaaacaagcaaatgacaccagatgcgatcggctatcttgtagcttatttggcagaggtttttggtggtgctgaccaaatcaagacaattttggacccagttgttggaacggggaacttattggcaaccgtaatcaatcatatccaaaaactaacggggaataccgtgcaaggttttggggttgataatgatgatagtttgttggaaattgcgggcatcagtagtgaattgcagaagcattcaacaacctttttccatcaggatgcgattgaaccgctactggttaaaccagttgatatcgccgttgcggatctaccaattggtttttatccattagatgaacgggcggctgattttgaaacccacgctgccagtggtcattcatatgcacatcacttgttgattgaacaaacgatgcattatgtgaaagaaggcggctatggctttttcctagtaccaaatgtgattttggaaacggatgaagctaagcaactgattaaatgggtgacaaaacatgtctatttgcaaggcttattgagtttaccagcaaacttgtttaagactaaggaaggtcaaaaagcaattttagtccttcaaaaacaaggtgccggggctaaacaagtggaccaaattttattaggtgaatttccaaattctaacgatcaaaaggcgtttgcaacgtatctacagaagatccggacttggcataaagataatttacaataatcgaatagaaaaggtgattagatgtcaaaagtattagcaattaacgctggtagttctacccttaaatggaagttatttatcatgcctgaagaacaagttgtcgcacaagggatggttgatcgtttaggattatccgattcagtctttaccgttaaatacggggatggtcaaaaattctcaatgacccaggatattaagacgcaagatgttgcggttgatttgttattgaagaagttaatcgaatttaaaatcatcaatgaatatagtgaaattagtgggattggtcatcgggtcgttgccggtggggaagactttaagtcatccgcattaattgatgaagcgtcattaaaacggattgaagaattgtcagaatacgcaccattacacaatcctgctgaagcaggtgttatccgtgctttccgcaagattttacatgatgtaccacaggttgctgtttttgatacatctttccatacaacgatgcctgaagaaaattatctttacagtttgccgttggaatattatcacaagtatggcgcacgaaaatacggtgcccacgggactagtcatcggtatgtttcccaccgtgctgctgaaatgttaggcaaaccattggaagaattaaagatgattaccatgcatcttggtagtggtgtttcagtgactgctattaaagacggtaaatcgttggatacatccatgggctttacaccacttgcaggggtgacaatgagtacgcgttcaggggacattgacgcatcactcgttgcatttttaatggaaaaattaaacattaaagatccagcagaaatgatcgatattttgaatactaaatcaggtatttatgggatttctggattatctcctgatatgcgcgatcttgaaaaaacgcgtgaagaacgtccagaatcacaattggcaattgatatcttcgtcaatcgtttaatcaagtatgttggttcatacgttgccattatgggtggtcttgatgtcctagtgattacagccggaatgggtgaaggtgacatcttaatgcgccaacgcatcgccgatcgcttgagtttctttggcgttaaagttgatccagaacgcaataacgtgatggctcaagaacgcgtcatcagcgctgacgattctcgcgttaaagtattattagtaccaactaatgaagaagtaatgattgccagagacgttgttgaaattggccacgtctaaggcatcagtgaaaatgaccagcgcatggctggtcattttttagtggagggaatgggaatatgacaggttttacattattttatggcttattggcaattgccttgctcattatctggctgattgttgaaacgaaaatggtttggcgcgcaaaacggaatcgactatggacgatttttttatgttgtgctggaatcctcttactaggtttaacgttagtgatgggcagaacgctcagcgatcaaatcacaggtatcggctctgttgtaattttaattgtgattgctttttggcctcgtggtttaaccaaaacaagtttgattgcaaacttaaatactattcatcaatttgcagcgatttctaagattgaattactaacacaaggtgacttagtcgaagcttgtttttatgtcggtgaaattcggattgccaagttgcgctttaaaacgacggtagaaaaattacaaacctttttaaaagaccggtttcctaagaaacgcttagtggtgaaatagggttaaagtctttcatattactggctgatatgctaaactagtatttgcatatcggggccgttacggattcgacatgtgtaggtgagcgtgagttgcacttcgtaggttacgtctacgttaacaacgttacagttaattataactgcaaacaataacaattcttacgctgtagctgcctaaacaccagcatagcgtgatccgactgacttcacccaagggttagatccgggtctcaaattaattgggttacgttaaacgctgccgtttgaggtgtttaaaagagatttgcaaactagctagttcatccgagcttctgtcggacggcgttttggactagcgaactcctaaatcgttcgactatgagtgtagagattgacgtggcaatgcgcatggacgcgggttcaacccccgccggctccattagataacaaggtgttaagcagaattaggcgcttaacaaaaggcgattaacactaccgtaacggtgttaatcgccttttttgtttgcaaaaaaataacagccacacgtgtgactgttacattaattgcttatgcccaacggtttgtttttgttggtaagagcattaggatatagaaccaaattgtcccgataagcggtatgaattcaatgagtacccaccagcctgagcggtctgtatcgtgaagtcggcgcattttaacggataaagttgcaatccaaacaatgaagacgacgatgttacgacccattgagatgcctaaatccccaatattatagatttctgaaattggatggccggttattgtttgaataataccgatgataataccacctagaatgtagttaatgatgattggccaccagaaatcaggtcggtttgaagtgcctgagaaatcaaaaatccgggaccaaaaactttgatatgatttaaccatgatgtaaaacccccttctccttatcagcttttcgcgtcgtcagttctggacgagatgaaaagttatgataaatttaataacttcctaccaaagatattatgacatacttaaacgagttttttacagtttttagcttacatagagaatcaataatttattcgccaacgcccattaatgaagcaagaatgaataataaccaaatgtgaattgggtagaacaagtagaagaaatacttcatgctacgtcctttttgtccgttgtacaagaggattgggataatcgcgaagatcatcatccattgcgtattgctagtgaagagtccagtgaaggcaaatccggagttgattccagcgtcaaggaatgcgaaaacaagaacggtaagacattgtaagagccggttgtttcggaaaagataaaaaaatactcctatgtagaggagaaggccattttccgcaagcataatggttggaataaccattgcgagattggcagcaaacatcattgtcttagggttagcaattagaccaagcgccaataatgataagaggataggagcaataattgccagtccaccaagcaaaatttgtttggaatggtgcgtgcggcgaccgacactaatttcttgaatcccatacattgctaaaacggcaatgtataaatcggtaaaaatattgtttgacagtgcgaggttaccgacttcgaagaagtgttggacaatggggcttcccaagttcataatccaaaaaccaacgagtaattggaacatgtaacgtttttgattccgcgtatgtatgaatccttcaactgccataaagaagaagatggtggcaactggtcgtccgaaccaatcaacccagccagggaccccagccccggcgaacatttggtgcacgtgatcaataaacatgaggataattccaattaccttgacgtcgaagttatttaaaacttgatatgatttagtctgcataatagcctccctaaaagttaagtaagtacattatcgtatgtttagctcatattattaagttttaaatggctagtgacaataatgttagatagcaaaaaccacgataaaaggaatttatcgtggttctgagcttatttagcaatttggcttgtgccatctgcgtaatttaatgtaacgccgtcttggacgttaaaaatgtaagtgttaaattgaatgctgttatccccgacggattggccttccatttgaacgccgcgggctagcagctcattatcgttaaaaataggtgtgacacggtaacgaacaaaacgattagggtgttttttgagataataagcaatatctgattcatgggccagcatttcgggtgcgtttagctggcgtgttcctgtcatcaaattctttggattattattttcaccggttagttgatagccaattaaatgactccgattatacagccagccagatttaatccgcttattatgccaaccggtcggattccaagtgagtccttcgcgcttggcagtaggcatcatcgattgatttaaaagaacatttgcagcaccaacgcgatttagtgcgtcgagattactaaaggtttgccaaccaccgtgatcggtagccaaatcagtagcactgaagcttggttggttattattgacgagtacctcgttttcaccacggtaggtgagggccgcgagctctgatgtgttatgacgctcaggactagtcgtttgcatttgttgctgatagttagtgagttttttgtttaactggttaattttacgttgaagcgcattaatttgacgttcggtttttttgttgtgcgcattaatgcgcttggtttcttgacgtaaggtggtagcgtgaacggtagttggttgttgcaaaagggttccgacaccagcaagtgaaattgttaccaccacgcgacttatcaaacgggttgctttcattggctaatcctcccatccgcaaagggtatagccttctgcttgtgcttgtgacaatggcatggttgtagtactgttggcacgacttaagccacggcaattgggatcaagatggtattttttaccagaattaggggcaattgtcaccatttgttcaacttgttgagcactagcagcttgttgtgcttgttggcttgcctgaattgcagcctgttgctgagcggcctcgctagcttgactagtagcggcgattgaggctgaagccgcacggactctttctgactcagacgctttttgctgctttttaacaagtcgtgattgactggcaacttgttttgtcagttggctagcctctgttttctttgtagctagttgtttttttaaagcgctcgagttagcacgggccgccttgttttcgcgtacatcaacttgatgttggctggtcttcttggaattcgcagcagccaccggcattaatgaaccgcctaagctgattaaggcgatgatgataatcagtacgcgacgccattttctgggtcgttgccggttaaagaatagtagtgaaatcagtgcgctccccaagaacgctaaaaataaataggacataataacctccaaagtaatgaataacagttcttaacgattgtatattgtacataatatgaaagcaattataaaaagcctaggcgtacctaggcttttagcggttaatctttggttgtgagtgaaacaattgcttttgtttgatagtatttttcaggattggtttcaaaagttaaccaatctgcatcagcgaatagaccagccaatgcaagaattgggcgttctttagcgagttgttgttcgctagaagttgcaatggcgtcttggtagctaccattgaagatttcatctagataaaaggcttgatcatcaccaacgtttaaataggtagtatcattcttccaagcatgtagcaaatccatttccgaaaaagtaacggtttcgttatttgaaaaagtcatgataaattgcatatgggtcaactccaatcaattaattaagcaacaatctatttggttgcctgcctaaattatagcatttagataataaaaggcgaaccttttgacagtcattgtggttaaaaagtagaatgaaggtgaacaaaatagaaaggaagtcattgatatggcaaacgaagaacgattagatagtttgaaaaatgtaattgaaggcacagttaagaaggttgtcagtgaagtgacacctaataaagataagaaagaaaaggcgcaaaaagctgacaaaaaataggacttagtaatgaagtaaaggtcaaaatcatccgtttggttttggcttttttattggaaagccgttaaatgcgttcgcttttacgaggcaggcttggtataatttaaaggatagtcagaggaagtaggtacaattaatggattacgcaggaatgttagaccggcaaaagcacattcgtaatttttcgatcatcgcgcatattgatcatggtaaatcaacattagctgatcggattctcgagatgacggatactattgccaagcgcgatatgcaagcgcaagtcttagatgacatggaattagaacgtgaacgtgggattaccatcaagttaaacgcggtggaattacactaccatgccaaagatggcgaaacttatattttccatttaatcgatacacctggacacgtcgatttttcatacgaagtgtcacgaagtttggcagcttgcgaaggcgccttattagtcgtcgatgcggcccaaggggttgaagcacaaacgttagccaacgtttatttagcggtcgacgatgatttagaaatcgtccctgtcattaataaaatcgatttaccatctgcacaaccagacgttgttaaagcagaaatcgaagagatgattggtttggatgcttcagaagccgtgcttgctagtgctaagagcgggattgggattgaagaaatcctagaaaaactggtaacggacgtgccagcaccaacgggtgatttaaaagcaccattgaaggcgctgatttttgattcgatctacgatagttatcggggtgttgtgttaaacgtgcgggtttttgatggcactgttaaagtcggcgataagattcgcttgatgaataacgggaaagaattcgaagtcactgaagtcggtgtgatgtcgcctaaagccgttaaacgcgacttcttaatggttggtgatgtgggttatattacggccagcatcaagaccattcaagatacgcgggttggggatacggtcacccttgctgacaatccggcagcagaagcccttgatggttatcggcatattcaaccaatggtttattctgggatgtatcccgtggataacgcgaagtttaacgacttgcgtgaagcccttgaaaaattacaattaaatgatgccgcgttggaattcgaacctgaatcgtcacaagcattgggctttgggttccgttgtggcttcttaggcctcttgcatatggatgtcgtacaagaacggcttgaacgggaattcaatcttgacctgatcatgaccgcaccatcagtggattatcatgtcgatttaaccgacggcacagaagaagtgattgataacccaacagaaatgccagaaacatcaaatatttcagaagttaaagaaccgtacgttaaagcatctatcatggtaccgaacgattatgtgggggctgtgatggaacttgcacaacgtaaacgcggcgaattcgtcacgatggattacttagatacctatcgggttaatgtcatctacaacatgccactgtctgaaatcattttcgatttcttcgatgacttgaagtccaataccaagggttatgcctcattcgattatgaagtgactggctatcgtgcgagtgatctggtgaagatggatattctattgaacggtgaatccgttgatgccttgagttttatcgtgcaccgtgactttgcctttgaacgaggcaaagcgattgttggtaagttgaaagaaaccattccacgtcaacaattcgaagtgccgattcaagcagctatcgggaataaagtgattgcccgttcaacagtcaaggcctaccggaaaaacgtgctcgccaagtgttatggtggggatattacccggaagcgtaagttgttagaaaaacaaaaagccggtaagaaacggatgaaatccgtgggttcggtggaagtcccacaagaggcgttcatgtccattttgaagatgaatgatgaagataccaaaggtaaataaaaaaataaaagcgtgctagtcgaggctgactagcacgcttttttgcgttattgaaaagaaataacagttttaccaacacgttaatggatagcgattgagacgagcaggatgtttggtccctataaaaagccgctccagaaagctattcatgctgcgcgctgttgatgggtgcaaataacttaatgcaatataatgcgctaagtccaacaaggacatatacgatgcgcgaaataatagctgcttgaccgccaaataacatagcgactaggtcgaatttgaatagaccgacaagtagccagttcaaaccaccaacgattaataaagtaagcgcgatattgtctaaggttttcatagtgacacctcctttagtagttaagataacatactcaaaggtgggaaacaataaaattgcttagaccaagttttgtaacttagcaaagaattaagggtggttttttagaagatagattgcaaaaaaagcatgctagtcaaatttgactggcatgctttttggtgtttattgaagcatatcgattagtttcagaaagatcatcatcacgaggatgctgacccaaaagagcacattcgatttcttcttaagttggtcatttttcttttgttgggcgatgaataagatgactgatgaacttaagacgccgattgcagcaatgatcacgatcaataataaaatgagatgttgagcaggtgacatgatgaggctcctttaactgattgattctaaggagcagtataccaaaaaaatggagggacgagaatagtgaatctacctgatgaagcattaactcttggtaagatacatcgtttttaattggttgagatccgccttagtcaaacccagcccgtgtttcaaataaccattaacgccaccatattctttgttcattgtgtcatatgcggcctgtagataggggttacggacggccatcattgcagtgatcgttttaacggctttggggttattgtgagttgccaccttaatttgttcaattgtcttttcattttcggcgcggcgatatttattagaggcgaggtagtcgtccatgatgctcttttgatcaaccccgagggcactgaggactaacatagtaccgaatccggcacgatctttaccggctgtacaatgccaaagtgtcgcaccacttttattattcaataagacattaaagaactgtttatagttcgtgcgtgctgcgggatcagtaaccaatttttggttaatatcaatcatgaaagcttcaccatcaaccttatcgagattcttgaaaaagtcagcttgacttgccgaagtccctaaagacttggtgacatcatagtgattgtagtggacgttgcttaaagcgggatcgggtttagccgcaacttcgctactagtccgtaaatcaacgatgttatttaattgttttccaacggttaacttctgtttatccttcgttgttaaaccagctaattcaccagaacgaattaaccgattggctttaattttggcacctgttttcgtgacaattccacctagctcacgagtattaatcgcaccggctaattgaatgtggcgactcatgttttgtttagggacaagggtggattgatgagctgtcgattgtttagtatttttttgtggggtacagccggctgccaaaagtaataaagttgttgttgccacgtaagggatgattgtttggctcatgcgcatattgattgcttcttgtaaaacgattttttattctttacaaggttaagcataaacaaataatgtaaagtgtttgttgttctagtgaaaataaagtgtaaagcttcgtaatggtttggtaaattcataaaaaaaggcctagtagtggtttaatgatacaatggggttaacttttagatatggaggatgataagatgcatgcaacgcaactattaagtgcaacggtcgaacgcgctcaagaacgattactcgatacattggaacaaatgacagtggctgaggccaatacaatgccgcagccactaattaaatcggtgacctggttagtatggcatactgcccgtgaaatggattatcagattgcggatttgaaagggatacaaccattgtggatacgtgcaggttggtcacaaaaatttgcattagatctacccgatgaaacgcaagattggtcgcattcaccagaagaagcagccaaagtgattatcatcgataaagcattattaattggttacttagcagacgcattgcaattgacgcttgattacctggctgaagttactgacgagtctttattagagataattgatgaaaattggacaccggcagttacccgtgaagcacgcttagtctcaatcgtggatgatgcggtcatgcattccgggcaagctgtttacactagaagaatggtaatggggaaataactgctaggacaggattggaatcggtttaacgaataattagtgaagggtaaaaatagataccgtatggtatctattttttgttatccggcaattgaattgcgtgctactatattaaatgtaattaataataatttggaggaattatcaatgaagacaaaattattttcagtattagcaacaatggtagcaccaacagcaatgacagtggggtcagtatcagctgacgcagttgctccgcaaacatcaaaagccgactttagtgttgttgctaaggatccaacaaacccaacagatcctgaaaatgggacattagtattaaaatcagtaccaagtttcagctttgggacaattgaagctagtgcgatttatgctggttttactggtaaagttgctaaaacagctggcgctttagaaattgctgatatacgtttaggcaaatctgactggtcgttgacagctgacatggctcaattcacagatgatgctaataaactaacaggcgcaatattgaatttagattctactggttcacttggtgaaactttaacaggtgctgttaaggacgattctcctgccgttgaagtggttaaaggtaacgggaaacatggtgtcgataatttcaagatggaagcagctacgttaacattagcagcaaatccagcagccgatttagctaaagatgagagtttcacaacaacaattaattggaatctttcatcaacaacaccaactgcaccaactgcttaatcattttactattaaacgcacgaaataagtgaataaagttaacgaagcgattgatgtggagggtgaaaagtataagccagatttgtattatactggaaaattggataaagatccgaatacaccagggattccagctaaatataaaattgctgcagggaatgtctctaaagagaaaacggtttatgttggtgggttagcagcctacaagaaagcggcggatctcggtgggacttggtcagttgatggtttgtcagacctagctaaggcatctggttcaacgagtaattggcattatgaatggcaatttacagatggtgaggataagacaataacccccgctactaatagtggtgtttctaatcttaagggtgacattacaaatttagcgaacttaaatacggaacaaccactaacctttagtaaagatagtactttcatgaaagatgctgcagctgcaactacggctggaaagagttatcgagcacagctaacattaacgactaacgtaacggaagaatcaagtggaagttcaaaaaaagttacgattgtttctaacgaagctgaattacaagcgcaaccagcagttggtaagttgtcattggatcaagtgcctagctttagatttgggaacgtcttatcaaaagatatttatgttggtacaactgctcaggacaagcaatatcaggtcagtgatgggttgaaaatcacggataccagagcaacgccaggttggtaattgacagtgaagatgagtaaaatggcatcaaccacaggcaaacaattaagcagcacagccattaatatgactggcttgccaacgaacgtaggattatctgataatggtactgaaataccgattatgacggataagatgtcgaaaacatggcaagttgctgggaaattagcattaagtgccaatccaaatattcaacttgcggctggtgatacattctcgagcaacattatgtggactttaaatagcgcacaacccgcagcaccagcggcttaagttgttgattagaattaataggtaaattaaaaaagatgaatgatttcctgaatatcagggaaccgttcatcttttttcgttagtcgatatatttaacagccgtgccataagcggcaactgattgcatatctgttccgattgaaccggaatcaaagcgcatcatgacaagcgcatctgcgcccatttcaagtgcattttggcgaagccggtcgatggctacatcgcgtgattcagtcatcatttcagtataggctttgatttcgccatcgacgacatttttcaatgaagcgccgatgtttttgaagacgttattggatttgtcatgattaaagctcttttttagaagaataagattaacaataatgtgattaaagcgggtaagccttgtaagaagaaaattttcttggtggcggtaaatgtcccgtaaagggcaacgatgaagatgtagagcattaatagggcgaggacaatcttgagcgtttggccggctaataacaggttgaccatgataattacggcgcccaacattccgttataaatgccttggttggccagtgccacgcgggcatttggtagtttgacaaagtccagcggcatgtcaaaagctttcgcctttgtttcagcactggcaaacatttccagccccatgataccgatgtgttcaacggcgattagataagttaaaacaagaatcaatacttgcataagttagtgcctcctcaatggtggtttcattataacaaaaacaatgacgcatgtccaaattaggccataaaaaaacacgccagagaatttctggcgtgttccttcatcattaaccgcggtctgtataaccgttgttaataccatattttctcgctattaattcataacctaaggatgacgttagataatcctgaacaacttttatttttaatgttttagaatatttggtcaatataaaaacccccgatattggattttggtccaatatcgggggttcacttcagagacagattttgtcttagcctctttttttgtgttacttttcaggaagaactcgcctaccagctctccgtcttaagtctgatttataagcgaattacttgaaagtttgacctattttgactattatagaattagtcagaataatctgacacttaatttaaaaaataactgaaaaaggaatgacgtctatgaatccagaacaaatgacacaagctgtccaagatgcacttgcagaagcgcagaaaatcgcgatgacgcgtcatcaaactgaaattgatattccacacctctttaaatatttagtccaaccacaacaactaggacggcaaatttaccaagaagccggtgcagatatcgatgctcttgaggcggagattgatcgtgaaattgacgcaattccaacggttgaaggtcaaacgaattacggtcaaaacatctcacaaaacttgtaccaagtattaactgctgctgaaaaatacaaaacagaattccaagatgaatttttatcaactgagacggtcatcttgggcttaatgggtttgaaataccaggcacttgttcaatatttacagaaacaaaatgtcactgaacaaaaattaaagaaagtcattactgatttacgaggaggcgagcgtgtgacatctaaaaaccaagaagataattaccaagcgcttgaaaaatacggaacggatttaatcaaagcggtccgttctggcaaaatggatccagttattggccgggacgaagaaattagagatgttattcggattttgtcacggaaaaccaagaataaccccgttttaattggggaacctggtgtcgggaaaacggcgattgttgaaggattagcgcaacgaatcgtccgtaaagatgtgcccgataatttaaaagataagacaattatttcactggatatggggactttaatcgccggggccaaataccggggtgaatttgaagaacgacttaaagctgtgttaaaggaagttaagaagagtgaaggtcggattctggtcttcattgatgaaattcacacgattgttggtgctggtaagactgaaggtagcatggatgctgggaacctcttgaaaccaatgttagcgcgtggtgaattacacatgattggtgcgacaacgttggatgaataccggcaaaatatcgaaaaagataaggcgcttgaacggcgtttccaaaaagtgctagttcaagaaccatccgttgaagataccatcagtattttacgtggtttgaaggaacggtttgaaattttccacggtgtccggattcacgataatgccttagtcgcagctgcgacgttgtcaaatcgctacattacggatcgattcttaccggataaggcaatcgacttagtagatgaagccagtgccaacattaacgtcgaaatgaattcacaaccaacggaattggatcaagcaacgcggcaattaatgcaacttgaaattgaagaagaagcgttaaagaaagaaaccgacgccgcttcgcaaaaacgattggctgagacgcaaaaacaattagctgatttacgcgaaacaacgaataatttaaagatgcggtgggaaactgaaaaagaagatttgaaccgcattaatgataaaaaagcggaaattgatgctgctaaacggcaattagaagaagcacagggaaattatgatttagaaacggctgctaagttgcaacacggcacaattccacaattagaagaagaccttgccgaccttgaaaaggctgaaaagccagaggactggatggttcaggaatccgttactgaaaatgaaattgcaacggtggttagttcccaaactgggattccagtcgccaaattagttgccggtgatcgacaaaaattactgcgtcttgccgatgttctgcatgaacgggtaattggtcaagatcaagctgtcaatgctgtgacagatgctgtattacgttcacgggctggcttacaaaatccagaccgtccgcttggctcattcctcttcttaggaccaacaggggttgggaagaccgaattagcaaaagctttagctgaggatttatttgattctgaacggcatatggtccgcattgatatgagtgaatatatggaaaaatattctgtatcacgattggtcggtgccgcaccgggctatgttggctatgaagaaggtggccaattaactgaagcagttcggcggaatccatacacaattgtgttattggatgaaattgaaaaagcccatccagatgtctttaacattttattacaagtgttggatgacggtcgtttgacagattcacaaggacggacggttgactttaagaatacaatcatcattatgacttctaacttgggttctgaaatcctactggacggtgtagatgaagaaggtcaagtttcacaaacggctaaggaaagtgttcaagccttaattcagacgaaattcaagccagaattcttgaatcgaattgatgatacaattatgtttacaccattgagcttgaacgatattcaagcgattgtggtcaaaatgcttcatgatctatcagaccgtttgtcagatcaagaattgacattgacgatttcagatgctgctaaacaatgggtggcagaagaaggttacgatcctgcatttggggcgcggccattacggcgttttattacgaaccatatcgaaaccccattggctaaagaaattattgccgggcatatgttaccaggaaccacggttgaaattaacttaaaagataaccagttagtttttgaaaatcgctaacgattgaaaaagcgctgcaaatttaatttgcggcgctttttttggacatcaatcagggattattactgtcagattgatgtttgtatggtacacttattagggatgatgtacagaatgttagtgacgattaaggacgattccactttgaaagtggtgtcattaagagtcgttaatcaattgtttttctgtaattgacttgctcttagcggataaacatagtattatagaagtcgcggacaaaagtagcgggacacgtgatgatttaaaatcaatttgaatgggattgagataatccttgccaaattccccgagttcggtatatcattaatgaatctaagatataaaggagtctgaaaataatggcagttccagcaagaagaacatcaaagacgaagaaacgtatgcgtcgtggacatatcaaattgaacacaccaaacgtacaattcgatgcaactaatggcgaataccgtgtaagtcaccgtgtatcaccaaaaggtttctataaaggcgaacaagttgttacaccaaaagctaacgactaatcgtcatcgagagtttctgaataagaaactctttttttatgcagtttcctagttttaaatactagatggtggtataataagtattgaataaaaggagattgataattatgaaaaatgaacacttgaaacaaaagctcgatcgtttacaaattgtacgcttaccacgttggacagacctgcccgatttggaactatatatggatcaagtggttagttacatcaatcaatacctaaacgcgttaaatttagatgaaatcaccgcttcaatgattaataattacgtcaaaaaagaaattgtggcagcaccgattaaaaaacggtatacaaaatcgcaaattgctcaagttttaattattgcactattgaaaacgagtttttcgattgaagaaatcaaacaattgatgacagcggaaacacctaaccgaaatgaaaagcaactttatgattactttatcttaacgtttttagcagcgattcatcagttagatgaggattacagcccctatgaccaaggcaaaaatccagcaggtacattggtcactgaaacccaacaaacattgctgaaattagcatgtcagagtgtggtatataagattgcaattgggattactttgaagaaagaaccagttgaagaaaaaacgccagcaaaaaataagtaattgactagaaaatgagaattgaattaagattcacaaataattcaattacaaaaataatgaattcgtttacctctttctattttcgccgtaaaataaaggtaactaattagtttattaacaaatgttagttaactaatttttattcagaggattaatcattgtggttaagtctgaaaaaaatgaaagaggtgttttaggtggcagaaaagaagaagacgaataagttaacgcttggtgcgcttattctaatggtctttacgtcagtctttggatttacgaatatcccacgtgcgttctacttgatgggatatgcatcaattttttggtatgttttagcagctgttaccttctttattccttatgcatttatgctcggagaaatgggagcggcctttggtgaagcaaagggggggatttactcttggatggagaaatccgttaacgctaaatttgcctttgtcggcacatttatgtggtttgcttcatacattatctggatggttaacgtcgggaacgggatttggattccattatcaaacgcctttttcggggttgataaaacacaagaatggtcaatctttggtttgacaaatggtgtgcaaacattaggaattttagctattatttggatcattgtcattacctttgtcacatcaaaaggccttgataaaatcaagagaatcaccagtattggtggttcagccattacgttaatcaacgtgattttattcttgggtggtttgttaatccttgttttaaataaaggggtaatggcacaacctgttacaacccatgcattcttccaatcaccaaatcaaagctatacatcgatgattcaagtcttcagtttcgttgtatttgcgatcttcgcttatggtggtcttgaagttgttggtggattagtagatgaaactgaaaacgctaaggttaactttccaaaagggttagctatttctgctgtcgtgattgttgtcggctatgctgttgggatctttatgatggggactttcactaactggaacttcgtctttaccaatggtggtggcttcgccaaagcaaccggttcaaacgcaaccgttactttggggaacgttgcttatattgccatgaacaacatgggttaccaattagggttagcaatgcacttaagtgaacatgctgctattcaagttgggatttggctcagtcgttacatggggctttcaatgttcttagcacttagtggggctttctttacaattattttctcaccattaaaaacaattatcgaagggacacctgctgccttttggcctaagtcatttactaagaaaaatagtaataatatgccggtcaatgcaatgaaggtccaagctgcaattgtaattgtgattattgccttcgttgcttttggtggtaagagtgctgctaagttcttcgatatcttaacagcgatgacaaacgtttcaatgacattgccatacatgtttgtggcatactcatactttggctttaaaaaggatgaaagtatcgaaaaaccatttacaatttataaagggaagaccttctataaattctgtgtctgcatggtcatgttcacagttggttttgcgaacgtctttacgattattcaaccagcaattgatggtaatttaagtcaaacaatctggtcagttgctggccctatcttcttcacaattgttgcattatatatgtttaaccgttatgaaaagaaaacaaatttaaaataagtttttaaaagagcggccgttaagtggtcgctctttttgattggtcttaaaaaatgtgacacttcgtcgctttcgcttgaattgtgattctaaaagggttaagctaagatttcaatgagttaaatttcaatgaaaaggtgacgaatatgaaaaaaacaattgttggtttagtgaccagcttagggctaatcggtctattggctggttgtgggacaaccaaattaacaacgactaaaacaaattatcgccaaaatggaatggtggcagtcgtaaaaggttcaacaaccaaaaaagctgatttacaataccggattaatcataatcatttccaaaaagcaacggtcaaagacggaacttatgtgattcaagtaccaacaacgactaacaaacaaacagtaacggtacaagctaaagcaaacggtaaaaccgttcaaaagaaggtaacgattgcagcgggcacatcagttggccaatatgccaagattgccgcgcaatacaaccaggctttaattgggatggcgttatctaaggcagatcaaaccaaagcgcaggaattgcaaaaacaagcagcagctgccaaagcaggccaacttgcacctgctgatctgatgacacttaagcagcggcaacaggaagtacaagcagcaatgcaacaggtgcaacagacacaaaaggatcaattgctaccaaccacacctaaaaatggggtgactgaatgggtcgcaacaaagcatgtcaccattcgcggttctgttgatagtcaagatgtaatggggatgacgctcattacacccgttaaagcgctcaaagataaagcggcattgaaagattttgggaccagttttgcattgattgcgcaagcaacgggcgctgattccaaaaaagtgatgtccgaatttagcgattatacgaagaaaaacaaaaaaggtagtcaaaccacgatgaagacgattgaatcaaatggtgtgaagttcaataccggtttttcaacaagtgatttgtatatttacattacaaaataaacgtaaaaagggccgcaacataaagttgcggcccttttttgtgctttatttagctggatcttttggtaagacaagaggtaagaagttgagcaaaagcccaaaaataactgagacgataacagttgtttgaatgttaaagccggttttcgttagtttagaaccgataaatccaatgacaaacccaaaaatcaatgtccaaagtagattcataacgtatttcatagttggccttctttctttgattcaattctatgatattgtaacacgttttccaaagagaatcatttgaaataatttgttatactaagagtaatcgaattaacgaagaaagaaggggcgttgcttgccattcgttcaactacaggttaagagtacctatacgctcttggaaagtaccactaaaattgatgcactgattgaaagtgctaaggcgcgcggctatcagagtattgcgctgacggataagaacgtgatttatgggctagtcgatttttataaggcggccaaggcagctgacttacatccaatcttgggtttaacgcttgaaattggcggattacttcaaaccgatgaacggtttccgctaattgtattggcgaaagatttagttggctatcagaatcttttgaagctttcttctaaagtgatgactcaaactgatctggtttcatttgctgatattacacagtggttcagccatttagtagtgatcacgccggctcaagatggcgaattagtccgcctacttttgcaagcggaggagcaaacaacggcatatttgacgcaactccaggcggcagttgatccggggagcttgtacttaggaatcagtgccaagcgagcagcagccccccaacttagcgggttaattgcattgagtcagacgaccggagttccgctggttgcattaggtgatgttcgttatctagaaccagatgatgctttttcagtgcaagtcttacaacatattaaagctggtacgcaagttaatctccatagtggtgatcagacaacgccaggcggctattatttacaagctgctgatcagattacggccgagtttgaagcattgcagttggtcgaggccgtgcacaatacggataagattgcccaactctgtcaagttgagttgacctttaagcgggcccaattaccacgctttgaaacaccgcatcaagagtcggcaacggcatatctagaacagttaagtcagcaaggcttacaagttcggtttgccgatcaagcgattccgcaagaatatcaagaacgcttgcagtatgaattgcgagtgatcaacgagatgggctttgccgattatttcttaatcgttgccgatgtcatgcggcatgcccatgaacaacatattatgacgggcccagggcgaggctctgcggcagggtcgttggtggcctatgctttaatgattactgatgtcgatccgattcaatatcaattgttgtttgaacgttttttgaaccccaatcgggcgaatatgccagatattgatttggatatcccagataatcgtcgggatgaagtgctggcctatgtctatcacaaatacggtcggaatcatatggcgcaaattattacatttggcacactggcagctaaaatggcgttacgtgatgtggggcgtgtgtttggcttaagtcagtttgaaatgaatgattgggctaaggtaattccggacatgctgaaaatcacgttaaaagaagcttatcaacaatcacaaccattgaaaaatttggtggccgattccactcaaaatcgattactattcgagacagcacagaaacttgaaggactgccacgacactactcaacgcatgcggctgggattgtgttaagccaagcaccgttaactgatacggttgcattacaaagtggcggtgaagagattgaacttacacaattgccaatgggcaacgtggaagaactgggcctactgaagattgactttttaggattacgtaatttagggattcttgctaatattgtaaagcttgttggacagcaaacgggacagccgtttgacccacactcaattccgttggatgatcctaaaacacttgcattattccaacaaggtgatactaatggtattttccaatttgaatcacttggcattaagaatgttttacggcggttggcaccgagttcttttgaagacgtcgtggcgacaaatgcgttgtatcgaccaggtccgatggaaaacatcgacgtatttatcgctcgtaagaacgggcaagaacctgtcacttatccggacgagtcgttagccgatattttagagccaacgtatgggatcttagtgtatcaagaacaagttatgcaggctgcgtccaagatggggggctttagcttaggcgaagccgacttattgcggcgagcaatgagtaaaaagaagaaggcggtgattgatgctagccggacgcaatttattcaaggcgcactcgaacgcgggcacacagaaactgctgctacgacagtctacgactatattgagcggtttgccaattatggatttaaccggtcacatgctgttgcttatagtaaaattgctttctggttggcttatttaaaagttcatcagccagcagccttttttgcagctttattaaatgccgttttgaacaatccgacaaaaacgaaaacttacttagcagaagccaagaaacgtcaaattaaagtgctgccacctgatattaaccgcagtcaaagttatttcagattagccgactcagggattatctttggtttgttcagcattaaaaaagttcggcgcgattttgtggcggcgattattcaagaacggacaacgaacggaccgtttaaatcgttactggccttcttacagcgtatggatcctaagtttctcaagcaagaggcattagaagccttgatttatagtggcgccttcgatcagtttaatccgaatcggaatgcgctgttgaccaacttagccgacctgcttgatagtgtgaagttgtcagggaataacgtcgatttatttgctgttttagcaccgaaagaacgtgccgtaccgaatttaaccttgactgaacgattggataaagaagccgaatatcttggggcctatgtttcgggacatccggtcgaaaaatatgattgtgtacgccaacactaccatgtgcctgatatcagtgatttggcacccgagcaaacggtccatttggtgctattcattcgccgaattaaggtgattcgaacgaaaaaaggcgatcaaatggcgtttgtaacggggcaagatgcaaccggtgaaattagtgtgacgctctttactggcgtttatcaacgggtcagtgaatggctacaaacaggacaagttgtttttatcaccgggaaagttgaacaacgtcgcgatttacaagtggttgctaatcagattcaattggcacaagatgcacaaaagacgctacccaaagcgaccctttatttacgggttcaaacggcgttgacgagtcaagcgcaacaacaaatgtatcaattgttacaacaaaatcacggaacaacgccagttatcttgtacaatgcggccgataaacagtcaattctattgaacgagcgctattgggttgtgaacaacgaaaaactaacgaccgcgcttacaaaccttttagggacgggaaatgtgattttaaaagggtttgaccaataaagaaattggtctatctttgcgaaaatcttcgcaaaagacaagacttattttctgaaaagtgataatatattagtgactttaaaagaccaattggttttttaagtaaaatatttgcctggggtgaaaagatgaaacgcataggtattttgacaagtggtggggatgcacctggtatgaacgctgccatccgtgccgttgcaagaaaagcaatgcatgaaggccttgaagtctatggtatcaattatggttacgctggtttagttgccggagatatcttcaagatggacccaattacggttggtgacaagattcaacgtggtgggacattcttgtactcagcacgttatccagaatttgcacaagtcgaaggacaattgaaaggtattgaacaactcaagaagtttggtatcgaagctttagttgtcatcggtggtgatggttcttatcacggtgcacttcgtttaactgaacatggttataacgcaattggtcttccaggaacaattgataatgatattccatttacagatcaaacaattggtttcgatacagctgtgaacacagtgctcgaatcaattgaccggatccgtgatacagctgctagtcacgaaagaactttcgttgtggaagtaatgggtcgtggcgctggtgatatcgcgctttgggctggtgttgccggtggcgcacaagacattattatccctgaacatgatttcgacgttaaggccgttgctgataagctacgtacttcacgtgaacatggtcaaaaacacgctgtcattgtattggctgaaggtgtgatgcacgctgatgaattctcagaaaaactttctgaatacggcgatttccacttacgttcaactgttttaggacacgttgttcgtggtggggcaccaacagctagtgaccgtgtgttagcaagtcgtttgggctcaaaagcagttgaattattgcttgaaggcaaaggtggcgttgcacttgggattgaaaagaacgaaattatcgcacatgatatgttagacttgttcaatcacaagcatcacgcaatgttagatctttatgatttaaacgaagatttagcttactagattcatcgttccatatataaaattgttaaaacgactgaaaagtcttttaaaaaatagacataaaaggagagattccacttatgaagaaaaccaaaatcgtaagtacacttggacccgcaagtaacaatgttgaaactatcacaaaattaatcgaagcaggtgctaatgtattccgctttaacttctctcatggtgatcatgaagaacatttaagccggatgaacatggttcacgaagctgaaaaattaactggtaaaacagttggtatcatgttagatacaaagggtgctgaaatccggacaactgttcaacaaggtaagaaatttgaattacacactggtgaagtggtacgtatttcaatggacgatacacttgaaggaacacctgaaaaaatcgctgttacttacccaggtctatacgacgacacacatgtcggcggacacgttttaatcgatgatggtttagtggatcttaaaattattgaaaaagacgaagcaaacaaagaacttgttactgaagttcaaaacgacggtatggtcggctcacgtaaaggtgttaacgcacctggtgtttcaatcaacttacctggtatcacagaaaaagatgctagcgacattcgttttggtttagatcatgaaatcaactttatcgctgcaagttttgttcgtaaacctcaagatgttttagatatccgtgaattattagaagaaaaacacatggaacatgttcaaatcttccctaagattgaatcacaagaaggtatcgacaacattgacgatatcatgaaagtttcagatggtttaatgattgctcgtggtgacatgggtgttgaaattccatttgaaaatgttccttttgtacaaaagaacttgatcaagaaatgtaacgctattggcaaaccagttatcacagctacacaaatgttggactcaatgcaagaaaacccacgtcctacacgtgctgaagttaacgacgttgctaacgctgttattgatggtactgacgcaacaatgctttcaggtgaaagtgctaacggtgactacccagtagaagctgttgcaacaatggctcgcattgatgaaagaacagaaaaatcattaacagaccgcgatgcatacgcattgaaagcatacagcaagactaacttgacagaatcaattggccaagctgttgctcacactgcacgtaacttaggaatcaagacaatcgttgctgctacagaatcaggctcaacagcacgtatgatttctaaataccgtccacaagctgacatcttagccgttacattcgacgaacgtacacgtcgtggtttaacagttaactatggtgtatacccagttatcgctaagaaacctgctaatacagatgatatgttcaacttagctacacaaacagctcaagaacatggttttgctaaagaaggcgacctaatcttgatcactgctggtgttcctgttggcgaacgtggcacaacaaacgttatgaagatccaattaattggttcaaaattaacacaaggccaaggtgttggcgatgaaacaatcgttggcaaggctgttgtcgcttcaaacgctaaagaagctgctgaaaaagcaattgatggtggtatcttagttgttaaatcaactgacaaagattacttaccagcaatcgaaaaatcaagtgctatcgttgttgaaaacggtggtttaacatcacacgctgctgttgttggtatcgctatgggtattccagttgttgttggtgctaaagacgcaacagaagctatcaaagatggcgaagttgtgactgttgattcacgtcgtgggattgtttaccgcggtgcaacaaacgctctttaatcattcctgaatgatgaaatgaagccccctctgaaaagagggggctttttttgttttaaaaatgcgaatcttgaattacttttctgaaagtactgacaagtcgttcatttatcggtacaatagtagggagactttattggaggtttacatggaaagttggttatttttagtagcgattttaatcgttgcattgttagcgaaaaatcaatctttaatcattgcgaccgcggttgttttaatattaaaggtattcccgatttcaaataaggtgctgcctgtgatccaagccaaaggcattaattggggagtgacagtgatttcggttgctatcctagtcccgattgcaacggggcaaattggtgtcaaagacttaatcaatgcctttaaaacgccggcgggttttattgcagttggttgtggcgtgttagttgctgtactatcagcgaagggtgtggggctattgtccgctagtcctgagatgacagtggccttggtttttgggaccatcatgggtgtcgtttttctaaaagggattgcggctggccccgtaattgcagcggggattacttataccattttaacggtctttaatttagtaccaattcattaattaataagaataaaagaggttaactatgaatgaattaatcgggcaagtcattactgccttagtaacagatgaaaatgaaacagccttctttgtccaaaaagacggcgtgacatttgaattaaaaaaagaaactttagaacaagaattgacaatcggtgaaacggtgactggttttgcttatgaaaactcaagtcgggaattgatcttatcaacgtttattcctaaatcacgcgtgggccattatgcctttggtgaagtggttgaaacgcggcgtgatttaggcgttttcgtcaatattggcttgccagataaggatattgtcgtatcactggatattttaccaaccattacgaaattatggcctaaaccaggtgatcgtttaatgattgcgattgaagtcgatcaaaaagggcggatgtggggccaactagctgacgaaagcatcttcagatcaatttcaaaaggtgctaaaccagaaatgaagaaccaagacgtgatggggacggtctaccgtttgaagttagccgggacgtttattttaacggatgacttttacattgggttcattcatccttctgaacgtgaagcagaaccacgtttgggtcaacaggttaaggggcgcgtcattggtgtgcgacctgaaggtagtttaaatgtcagtttgaaaccacgggcatatgaagaaattggcgacgatgctgaaatgattatggctgtcttaaaacggcaacctgattacgcaatgccatacactgaccggagcgatccagaagcgattaagagttactttgggattagtaaaggcagttttaagcgggcattaggccggttaatgaaaaatggcttaattactcaagcagagggcctaacgagtttaactgaaaaaggtcaagctgatattgccccaattacagatgacgagaagcaagactaagcttttttgaatgattgaaaaggaagttgctaaatggataaagctgagcaattagaccgaatatccgagcagctacaagcggccggctacaagttaacagcacaacgctctgcgacggtggcggtcattttggaccatgcccaagcgcatctgagtgccgaacagatttttatggcaactaaagaggtggtccctgaaattgggttggccactgtgtatcgcacccttgagatgttgacggaactgcatgtgttgaataaagttcggttcattgaagatgggatgacccactatgacttgtgtgagactgatcacgaccatcatttccaccatcacctgttgtgtctgcaatgtggggcaatcgaagaaattcatacggatttattgcctgccgtggaacaacaggtatatgatgattacacatttacggtgttagatcatcgtttaacatttcacgggatttgtgcacgttgccaacagattaaccaacaaaatgggttaccagccaatcaactggatcctagtcgccaaattgacgtgacgcagttgtaaaagaggaagtacatggatgatttaattcaagattatttacattatttaaaagttgaacgcggtctttcggagaatacgcgccagagttatcggcaggatttacaacagtttgcggcgtttttacaacgtcagcaggttgccaattttactgaagaccgctttttaattttgaactacttgcaagaacaaactgatgtgcataaggcacaaagtagtattacacggagcatttcaacgttacgtaaattctatcagtatttagcgcgtgaaaagcagattaaacaaaatccgatgctccaaatcgattcgcccaaacaaggccgtcatctaccggctgttttatcgacggcggagattgagcgactattggcggcaccagatacgagcaccgcacttggattacgagatcgagcgattctagaggttttatatgcgacggggttacgagttagcgagctgattcatctaaagatggctgatttgcatttatcactgggcttaattcagaccctcggcaaagggaataaggaacggattataccgattggtgatgtagcggttgattggattaatcaatacctcgatcgtagccggaatcaattaacgaaggggcgtgctaacccgtacctgtttgttaatttccatggtaacgggttgacgcgccaagggatttggaagaacctgaaggcacatgttaaaacggctgggattgaaaaagacgtgaccccacatacattgcggcattcgtttgccactgtgctacttgaaaatggcgcagatctgcgaattgtacaagaattattggggcattcagatatttcaacgactcaaatttacacgcatattagtaagaaacatttgacagaagtttaccaatggagtcatccacgcgattaaattagatttgtcgcgctttataaactatggtagagttaatgctattagaactttgtttgatcaatggaggtcaacatgttattcaagtataaaaatgattatgaaaagattgcgatgggctttttatccttcgtaccggatttaaaagaagtcagtcatgtacaagctgaattggcgctctatacgtcggatgagcaacgcaatttatatttatggcgcaatgaagccggcgattttgccggtgttgtggggattgaactgggtgcggactatattttagtgcgccatatttcactgaacccttcggaacgtagcgacgagaactatttcaccatgttggatgaattagcggcgctttatcctgaaagtcgcgtgatgggttcgttagagactgcgccattgattgctaaatgggaacaacatcagaatacagaaatggactagattgaccaatgactgaacaattaacgttggtcttgactgattttgaaggaccactcgatttattattacatttaattaagcaaactaagattgatatttatgatattcccattgctgaaatcaccgcgcaatatcttgattacttgcaccaaatgcaagtattgaaactagatgttgcaggtgattatttagtaatggcggcgacgttgatgaagattaagagtaagttgctcttacctaaggcacctgaattaattgaagaagaaacagaagaatacgtcgatccacggcaggaattagtggaccaactattggcgtaccaagccttccaaaaggtcgcaacggttttgcaagagcgcgaattggagcgccaacagctctttgctaagccagctagtagtaatccagctgaaaaagtggtcccactggcgcgcggcgtgattaagccacgcgatttagcggccgcagtttctaaaatgttggtcgaagcccaagctaaacaaccggtcttcaaaacggtccaaaatgacgaaatttcgattacggataaaatgagttggattgtgcgtcatttagccgctcaaccagttgcttttgaagcgttggtcgttgttaaaacagatcgagatgaaatcgtcacaacatttttagccgtactagaattgatgaaggatcgaaaaattatttgcgaacaagccgactatgatgcaccaatcatggttcggttgaaggagggcatttcagttgaatcatctcgctgaaattgagagtttattatatgtcgcgggggacgaaggaattgcgcttgcgcaaattgcgcagcttattcatctcgatgaaccggcagtccgccagttattagaaaaattggcaaatcgttaccgcggcaacactgaatcgggtttgaacctgattcaagccgaagatatctataaattagtcaccaaaaaagaatacgcgacgttgttgaagacctattttgatggaccggtgtcaactagtattagtcaggccgctcttgaggtattggcaattattgtctatcgccaaccaatcacgcggattgaagtcgatgaggtccgaggtgtccaaagtagtggggccatccaaaccttgttagcccgccaattaattagcgaaaaagggcgtaaggatgcgcccggtcggccaattttatatggaacgagcacctatttcttagattactttggtcttgaatcgctcgatgaattaccaccacttgaacaattggcacttgacgctgatgtcgatggtagtgaaggtggtacagcagacttgtattaccgtcaatttgaacaaacgttaaatgaaacagatacgacgtcggaagagacgtccaaaggagaacaataaatggaacgattacaaaaagtgattgcaaatgctggggtagcttcaagacggaaagcagaaaccttaattgcaactggtcacgtcaccttaaatggtgaagtggtgaaggaaatgggtatcaaggtggatagcacaagcgatcatattgaagttgacggtgtgccgttaacgcgtgaacgcaaggtctattatgtcttgtataaaccacgccaagtgatttcagcagtgacagatgataagaaacgccgggtcgtcactgaataccttggcgatatcgttgaacgggtttatccaatcggccgattagattacgatacatctggcttattactactaacgaatgatggtgattttgccaacatgatgatgcatccaaaatataaagtcgacaagacttatattgcgaaggtttcaggattaccaactgcagatatgttgcgccaattgcgtaaaggaattgtcttagaaaaacgcaaaacagcaccagccaaggtcaaagtaatttcaactgatcggcgtaagaacactgccattgtaagcatcaccattcacgaagggatgaatcatcaggttaagaacatgctagctgcggttggcctacccgtaacaaagttgaaacgggaaacatatggtttcttaacgttagatgggttagtttctggcgaataccgtgctttgaaaccaatcgaagtcgcagaattcaaaaaaattgctgaactaaatgaaaaaccacagcataagaatcgaccaaaattatcacggcatgattaattagttgcttttggcacgttgatttgctatgcttatttcgaacaaaatattaatggttcgtcttcaggggcagggtgtaattcccgaccggcggtaaaagtccgcgacctgctacaatgttgattcttgtggtggctgaactggtgtgattccagtaccgatagtgaaagtctagatggaagaagatagggcttatttgggtatgaatgtatgcaagtaaggtctgttaatctccctgattaacagacctttttgatgcaatcagacttggctaagtccgctgacgaaggcaacctcatctggagggtgttagtaatgcaagtttcaaaagttcgtacgatgattggggtcgcaatgctaggggcaatttcatttgtcgtcatgtttttcgaatttccaattattctcgcatttccgtttttaaaaattgattttagtgacgtgattgtcctgttagggacgttcgtttacggaccaattggaggaatgggggtcgcattgattcgctcgacgcttcatttcattatgaccggtgctagcttaccgagtttggtcggcgactttgccggtgtcttggcgtcaatctgctacttgttaccattctattatttattcaagcgtcaatcgaacgttttagtaggtcaagcaattgctggtgttgcgggggctgtcagcatgacgatcttcatgtcatttgctaactggcttttcattttaccgctctatattaaattgatgggtttgaacttaggaatgtcgactaccaaatacattctatttggattagtaccgtttaatttaattaaaggtgcactcgtaacggtggtgtttgccgttttatatttacggattttaccatggctaaaacaacatatgcaaaaaccaattgccaaataaatggcagcaaaaaaggttgtgtccaagcgggcacaaccttttttataggacgtaaatatgctacgataaaaatggcgttgattggcgtacaatcgcaccagttggacaggcggtgtaggcggttttaaacgcaattcgttctttaggatcttcaattggcgtcgttccctgattatgatcgggtttaaaaaaggcgatcccttcttgatcgtaatcgaataagtcgggcgcctttagctggcagagaccgcaggcgatacagcgttccgggatgacttgactatagagcattaaattcacactttctcaataaaggacttaattgatgatgttaatggcgtatctactatgcttgttggcgcctgagaaaaggcggtatcaagcaatctactataccttaattggtaaacgaactacttcaaatctgtatgccggtttagcatatggattattaaaatggctccaaatttatcctaatctagaacaggcacaatttcaagcagaattaaaacgacttcagcaaaatggttggattgaaatcgatgagcggtatgtttggttgactgctaccgggcaacaaaaacaagctgaatggcagccgcaattagtttggccgacgcactatgaaggcccacagatgggtcacttaccccaattcactgctcgttttatgttggccgttcaaattgtgtcggaatatcatcatcaaaatacgcagtactatccattggaaacgagtatgaaggaccgcgtgttggtggtcagttggtttaagcggcataaggcaaccatcaattttagcagtcaattccagctagaattggcgcaattacttgaccagttagatccgcaacaagccgatcttgtggcaaatcaactgatcggacatcaagtcttgggcaaaagccaccaacaactggcgcaagccttagatagcccatccttgacagttcgtgtgcggaccatcgacgcctttgctcaaattttagggcttttattggcgcaccaaacgacttatccgctattgaatgaattagtggatcaggctgaaacgcaattgagtcagagtacgttacagacctggcaattgatccaacaaggggcgagtgttaaacaaatcagccgccagcgccgggttaagatcggaacgattaaagaacaccttttagaaaccgcgatgttactcccacggtttccgtttgaacaattcttaaaggatgcaactacacaaaaactagctagattgatgactgaacagccatcgctcagctataatgaagcacaaaccgcactccccggtctagatttctttgagtatcggctttatcaaattcaaaggcaggtgaacgcccaatgagcacggatgaactgatttataaaacgctaaaagagcggtttggctatgagacatttaagccaggacaattagaagtgattcaatctgttttggcgggccaagcgactttggcggttttgccgaccgggacgggaaaatcattatgttatcaattaccagcctatcttttgggccataccactgtcattatttcacctttaattgcattgatgcaagatcaggtcgcacagttgaattaccaaggtgaaaaaaaggcagtcgcgattaattcaaatttggaaccgcggcaaaagcatgcgttattgcgacaattgccacagtatcgtttcgtgtttatggcgcctgaaacgataagccagccggcggtcattcaagcactacaacaatgccagattgatttattggtcatcgatgaagcccactgtatttcacaatgggggattgattttcggccggattatttagtgcttgcgcaaatcaagcaccaattaaatccgggggcaacgctcgcactaactgcaacagctgatgcacaggttcggcatgatattttagccaagctagatttgcagtcggccaataggattattacgtcggttgatcgtcctaatatttacttaggggtgagtcaacaagcggatgaagcgagtaagcacgcctttttgcaacaattggtaactgagagtcaggggcccgggattatttatttttcaagtcgtcaaaagaccgtcgagattgcggcttttttgcaacaaaagacagcgatgcgagttgcctattatcacgcagcgctttcgccacaggagcgcttcattattcaacaacagtttatgcaagggcagttggacgtaatctgcgcaacgaatgcatttggaatggggattaataaagccaatattcgctatgtgattcactatcatttaccgcaaaatatcgaaagttatctacaagaagtcggtcgtgcagggcgcgatggccaaccagcctatgcaatgttgttagcaacaccgcaagatacgtatctgcaacagtcgttagtgtcatttgggattcctgaagctggattgattcggcgtttctatcaagaaccgacattatttaaacaaagccaaggcaacgagtttgaattattacggcggtatcagcaaattgggatggatgaacaggccgttagtgaactgttacagaatcggcaaaaagaaaagcgttttgcgcttcaaacaatggttgattatttaaacttacaaggctgtcggcggcaatttattgtgaactattttgacgagcaaccccaacaggttgcccatgctgatcaatgttgtggtcaacaggattcaacggtctttttagaaaaatttaatttaaaaacgttaactgatgataaatcccctaaaatagacgggttagaccattgggacggtattttgaagcaattgttttagagattttctgggtattttaaaagggtctatggtacaatatcaaagaataccaatagggagggccgtcaatgctcaaagatgataagaaaaaattagataatcagacggaagacaaaccctgggaaagccagtttgatgatgatcgtgatgatcgcgggaatttatcgcgtgttgcttccaagagtaaggaaaaaggaaatacatattttgccattattctaggtgtattgcttgttttaatgattgcatttccgattattgcctatacgattcattctagccgggctaaccgcccagtcgagtctagtaagattgtcgttaatacttctgatagtgatagtgcttctaagaaagaagctaaaaaagcgaagtctgctagcgaaagtgctaccaaagcggccagcgaaagtaaagctaaacaggctgaaagtgaaaaagcggctagtgaaagccaagcagttgaaagtagcaaacaagctgcagaagaagctgaaaaggctaatagtcaaagccaagctcaagcagacgctcaaaatagtagtagcgaagaaacaacaactgaaagtagcagttcaagcgaaacaacgggtggttcttatacgttgaaagccggcgaaggtttataccgcgcagcggttaataacggtttaacactcgatcaactacttgcattaaaccctgggttaacagccaattcacaagtggcaccaggcacagctctaaaagttaaataatcagtactaccaaaaggcctggggaaactcccagccttttttaatgattttttcaggaggcagaacatgcaaattgcaattgatggaccagcatcatctggtaaaagtacggtcgccaaaattgtggctactaaattagggttcgtatacgttgatacgggtgctatgtatcgcgcatcaaccgtgttagcacagaagttagggttagacttcggggatgaagcgggaattttagcagctttaaaagaagcagatatccaatttaaacctgaccaagcagggcaaaaagtcttcttgaatggtgaagatattacattagccattcgaacccctgaaattacgaataatgtctcacaagtatcagctttagctggtgtgcgcactgagatggttgcacggcaacgtcagattgcagatcaaggtcaagtcgtcatggatggacgcgatattggaacaacggtgttacctgctgcgaaggttaaaatttttatggtggcaagtgcccaagaacgagctaaacgccgttatgctgaaaatacagctaaggggattatgacgcctttagcaacgctacaagcagagattgaattacgtgatcaaaaagatagtacacgggccatttcacccttaaaaaaagctgacgacgccattgaaattgatacaactcagttaacaatcgatgaggtggtcgacacaatattagcaattgtaaagaaaaatatgtaattttatctttgaacgaggtaaaataactggtaatccgaatagatatcaactaaaatagtaactgtatagatagtcgttaaggaggattttagctatgagtgaagctaatttgaataacacccaaagcagcgatgcaatggcagctgctttagacagtgtccacgaagtcaaaattggggacgttgttaaaggtgaagttttagcaattgaagatcgacaagtgattgtcggcatcgaaggaactggtgttgaaggggttgtgcctcaaaaagaattatcaagtcaacctattgaagacatcgcagacgttgccaaagtaggcgaccaattagatttagtggtcatttcaagaatcggtaacgataaagaaaacgggagctacttattatctaaacgtcgcttagaagcccgtaaagtttggtctgaaattgaacaaaaatttgctaatcaagaaacaatcacagctaaagtcatcgacgtggttaaaggcggcttagtcgtcgatgctggtgtccgtggcttcgtaccagcttcaatgatttctgatcgtttcgtacgtgatttaagcagctttaaaggccaagaattaaccttacaaattattgaaattgaaccaagtgaaaaccgtttaattctttcacgtaaagcattattggaacaagaacgtcaagctaagttacaagcagtttttgaaaaaatgttacctggggatgttgttgaaggtgaagttgctcgtttgacaaactttggcgcattcatcgatttaggtggcgttgacggcttagtccacgtttctgaaatttcatatgatcacattaaccaaccttctgatgtcttagaagttggtcaaaaagtgcaagtgaaagtcttgagcttagaccaagaaaaaggccggatctcattatcaattaaagatacgcaacctggtccttgggatgatatcgctgataaagcaccagttggtagcactttagaaggggtcgttaaacgtttaacaacatttggcgcctttgttgaagtcttccctggggttgaaggtttagtgcatatttcacaaatctcacatcaacatatcgccacaccaaacgatgtgttagaagaaggccaaacggttcaagtcaaggtcttatcagttgatcctgaacaacaacgtttaggtttatcaatcaaagcattgcaagaaaaacctgctggtgctaaggattcagaacacgaagatgtggcgccttctgactatgtgatgccagaagaagaaacaggtttcagtatcggcgacatgcttggtaaaacattagacgataaataatttttttaaaagtcatatgcaaaaaggtagggtctgggacaaaactaggttttgtcccagaccctacgtttatgtcggtgattgattagtacgacgcagaggaagcggaagttcagcggactttgtcggagtgaccttgtcagtttggctcagacagggtacactgaacaacgaagggaatgaatacaatgacaaaaccagttatcgccattgttggtcgacctaatgtcggtaaatcgacgatttttaatcgcattgccggtgagcggatctcgattgttgaagatacgccaggggttacgcgtgatcgcatttataccacaagtgaatggttagggcatgaatttagcctaatcgataccggtgggattgaaattagtgacgcaccatttatggaacagattaaacaacaagcagaaattgcaattgatgaagcagacgtgattatcttcttagtgagtgcacgagaaggggttactgatgcggatgagcgagttgcacaaattttataccgcgctgacaaaccgatcttacttggggttaataaggcggataatccagaacaacgccaagatatttttgatttctatagtcttggctttggcgaacccatcgccgtttcaggggctcatggtcaagggttaggtgatcttttagatgccgccgttgctaagttcccagctgaagatgacgaagaagaagacgatagcatcaagtttagtttgattggccgtcccaatgttgggaagtcatcacttgtgaacgcgatgttaaaagaagaccgggtaattgtctctcaaattgaagggactacgcgggatgccatcgatacgaagttcacggctgaagataatcaagaatttaccatgattgatactgccgggatccgtaaacggggtaaggtctacgaaaatactgaaaaatacgccgtaatgcgtgcattacgtgcgattgaccgttcagacgtcgtattagtcgttttgaatgctgaagaaggtattcgtgaacaagataagaaagtggctggctacgcacatgaagctggtcgtgggattatcatcgtggttaataagtgggatacacttaaaaaagacaaccacacgatgaaagagttcgaaaatcacgtgcgcgatcaattccaatacttagactatgcgccaatcatctttgtatcggctaagacaggcgttcgcttgcaaaacttgccagcgatgattgaacaagtgagtgaaaaccaaaaccggcgcatccaatcagcactcttaaacgaagtcttgatggacgcaacaacggtgacaccaactccagctattaatgggaaacgattgcgcatttattacatgacacaagtagcggttcaaccgcctacatttgtggtcttcgtaaacgatgttaacttgcttcatttctcatatcaacgtttcttgaagaatcaattacggaaaacctttgactttactggtacaccaatccatttgatccctcgtcaacgaaaataagctgttttttcaaaaatccgctaatatgattaactaatttgctcagaatgctgttttttagcgaaattccttgctatcactaggtttgtgtgataaattaaaaaatgaaatggtgatcaaatcattgtttcgtcatttttgaccactcaaaaatggtttcggtaattaattactgattatctgtgatgagcaggaggtgaaaaacatggcaaacaaagcacaattgatcgaaggcgtagcatcaaagactggtttaactaagaaggatgcaactgctgcagttgatgcagtatttggttcaatccaagacactttgaaaaaaggtgacaaagttcaactaatcggctttggtacttttgaagtacgtgaacgtgcagctcgtaagggccgtaacccacaaactggtgcagaaattaagattcctgcaagcaaagtacctgcattcaagccaggtaaagcattaaaggattctgttaaataagaattcaatttataggctgggatttttcccagtctttttttattggcaattaatccgaatatgttaaaatggaacaatcgaaaaagggtggttaaatgacgaattcagaacaaatgcttacagcattagaagataataatttagaacaagcacagacttacttccaacaagccttagttgctgatgaacccgatacgctctacagcttagctgaagagttatatgcgatgggttttttggaacaagcaacgacaatttaccaacaattgttggcccaatttcctgaagaagatcaaatcagaacaacactagcagatattgcggtcagcaatggccaatacgacgacgccttgaacttgttggcagatattacgccagaatccaatgcgtacgccgaaagtctgctgacggcagctgatgtctatcaaacaatgggcttaccagaagttagtgaacaaaaattattgacggcgttgcgcttatatccagatgaacccgtcatgcaattcgcattagctgaattgtactttgaaatgggtgaatatgtgaaggccgccaattactatgagacgctcatcgaccaagacgttgttgaactgggacaggtgaatattcaaaagcggttggcaactagttatgccagcagtggggcttttgaagaagctttgcagatttacgaagggttgacgccagaatttctaacagaagacgatcaattccagatgggctttttgtacttacaaattaaggattatcaaaaagcaattgaaatcttaaccaagttacagacgactgatccacaatatacgtcactatatacttacttggcagcagctcaagaggctcagaatcaattagaagacgccttaacgaccgttcagaccggaattgggtacgatgcctacaacgaggtcctctatcaaaaggggagcgatctagcgcttcaattaggcaataacgaggttgctgaacagatgctaaacgaggccctcaagattgatcctgataatatgggcgaaattagtgccttgagccaagtttaccgccgtcaaggccgccatgccgaaaacattactttcttacaagatgcgattgaaaatcataaaccaacggctgatttatattggtcattggcgcaatcacagatggcggtggatgatgttgaccaagcgcgcgaaaattatctgttagcttatcctgacttgaaagataactcggactttctacacgatttaattttattcttccaagaaatggcacaggtcccagaaatgttagcggccctcaaacaatatttgaagctcatgccaaacgatttagagatgcaaactctctatgacgattaccaagccatgcaataatgcaaaaaaacgcccgactattactttagtcgagcgtttttttgcgtctttagtcgcgcttcttccccagatgaaagtggtacattgaagaggaatcgggaacaggatttatttggggaggtttttaggatgacaaacacaatactttcggttgcccaactaacacaagtggtgtcaattgggcagtctgaccagacgacaaccttattgaaaaatatttcgtttacggtgcaaaaaggggagttggtcagtattgttgggccttctgggtctggtaagagtacgttgttgtattgtatttcagggattacgcgacctacaggcggcactgtggcaattgcggggattaatccgtatcaattgaaacccaatcaactagcggcttttcgcagacagacgattggctttatttttcaacaatacaacttgattcagtctttacccgtctttgaaaatgttgtcttacaacagcgcttgagtcatcagcaaccgcaacgtgctgagattaaacagttactgaccaaaatgaactttgcgggacaaatcgatgggcctgttgcgactttatcgggtggtgagcaacaaaaagtcgcgattgctcgcacgattctaactgattgtgatgtgctatttgccgatgagccaacgggtgcgctagattcggcatccaaagcgattatttttacatatttcaaagagatggttgctaaagggagaacggtgattatggtgacccacgatattgagctggctagtcagacagatcgtgcgattgtattaaaagacggtcaggttcagcaaattgtgactgaaccgacacttgcgacaatctatgccgccttggatcaggtggtgtaagcgatgtggacaatcagttggttacagttaaagcattcctggcggcaatggctagcaacaataccagtttttgtaacagtgggtttaatcctcggtttttgtttaacgggaattgtgaatgtggcacagtcgcagcaagttgatctatacggtccgaatacaccgttgctgatttttatcatgccggtattttttggtggtattacaatggtaatcgtgattaaagaagtcgtgcaccagcttttggatcagtttaaaacggactatcgaatgcttgcgattctaggggcaacgatcaatgcactggccgctattttggggatttaaatcggaattgtcagtggggtgagtgctctgctcggcggagtcgttgccttgccactaacgcgtttttgttatgcgtggttgcagcagattgttgggccccaaatgttgccgaatatgccaattcatttttcgttcttggcacttttgttaacggttgtcttggttagtctaattgccggtagtggtggtttttggcatgcacgccatcaactaaaagatgggaataagcatctcagtcaccgacggcggatcgttcgtagagttaggacgattgtttcgttaatggtcgtcagtgggttaattattaaactaacgatgcaaagcatggcgttaacctatgtcggtcattccgagaaagcaattggcagtctcggcaattcggttggcaacctgaatctcgtgttgttcttattattaattctaattgcgcttaccggacacacggtattaaaattaattagccacgtgctctattggttaggtgctagaacgctctttttgaacatggcagcccatgatattgactatactgctgaaaaatatttgccgttgtatacgccagtgacggtcattgcggttttaattacggggatgtcggcaattatgtggaatataccggcctatacaaataccacgagtgccaacaatgaacgtttggtgaatttcattttgacaattggtttatatttgggcgcgccgttactgattgtattagcgaatgtattggcgacgctgttagtcgcaaaagaggataatgcccagcaaatgcgccaattacagttgctcggtttaacaaaacagcaactattgctgacacaacaatcgcatgcagtgatcttagttggtgtttgtcttgcagtcagcctactagccgggggcttagtttggagcctgacgattcatgtcgggcgaaccattttgtaccaagcacccatctcaatggcggctttgctcgctggaccgtttttaatggccgttagtatgctttgcctgctaacgatagttaatttagctcgtgtttattgtgggaaatgtttaactaaagcataaaaaagacagctagtgcatttttaagtgcattagctgtcttttttattggttttgattgcggttaagaatgtcctgcgcccacgcgcaccattctaattctgttgcgcagaccattaagcgccgtttcaaaatcaggtaacgacctaagtttttttgcttttcggtgggatcggttatgaggttgtattcttgcatcttatgttggtattgtttttgaattttttggtaatgatggcggcgatcttggagtaagtcagctgcttgttcttgattgaacagtgaaataacgtaaacttttgctaaaaactcgtcacgttgtgtgggtaaattcgtttcttcttgaaaccagtcagtaacgacgagttggccggcttctgttaaatgataaatcttcttttgtttatgaacgggatcaattttaaccgtgacatagccttgttcgtgcagtttatttaatgccgtgtagatttgactgtggtgtgcttcccaaaataaattaatgtactgctttaattcgtagccgctacacggtttgcgaactaacatacataataaaatatagctaagcgtactcatattatttcaccctttaatcgattaattattgctcagtataccatatttagagtcaacaaacatgtcactatattatgtcaaattttaatgtaaaaattgatatgttttgcaatctaatgtagtttatataaagagaaagagagtgatatgttgctggagaatcaaaataaagggctacgctcggcgtatgccgttgcatttacgtgtatggttgcatttatggggattggtttagttgatcccattttaaaaacgattgcggttaaattaaatgccacaccagcgcaaacgaccttactatttacgagttatatgttggtcacagggattattatgctatttacagggtttatttccactagaattggtgcgaaaaaaacgattagtattggtttgatcattattgttttatttgcggcgttagctggtcgttcacagaccattacgcaattaatttcgctacgggccggttggggctttgggaacgccttgttcctatcaaccgctttgactgcgattgtcagtgtgatgcctgaaaaaacggaacaagcgattatgttatacgaaggatctttaggaattgggatggccgttggaccacttgtgggtggcgtcttagggagtctttcatggcgttttccgttttatggtgtcgccattttgatgtttattacggcgttgaccatcatggtttcattagaaccgattgctaaacctgctaaaagggcgcctttttttgcaggggctgtcgcgttaaaaaatcatcgtttacgttcaatcgggattattgcattattgtataatttcgggtttttcacgattttagcgtatgcaccattcttattagttgggttaactgaattgcaagttggttttgtctttttcgggtggggcgtgatgttagccattgcatcggttttcattgcaccacggatggaacaaaaaacgaatacccttgtgacgttgttgtttgggttaagctttttcttgatctgcttaatggtgatcggtatttatgcagatcaaccagccttagtggcctttggcgtcatcattgctggtttcctccaaggcttggtgaatacgttgttaacgacggttgcgatggaaaatgattcgattgaacgcagtgttgcatcatcggcgtatagctttattcgctttactggcggggcaatcgcaccatttgttgctggtaaaatcgctgagaaatggtcagcgcattggactttttattttgcgagcttaatgattttaattgggattttccttgttctgcgcaatcaaaaatattttgtgacggttgaagaagttgaaaaagaaattgagttaactgagggacaggaattatcataaagacacttaaaaacgccagcgattaatcgctggcgtttttattgattagtcgtacgtaaagccttccccgagtgcttcgtgcacatcaataatggaaacgaatgcgtgcgggtcatgttggttaatcaaccgtttaagataggcgatttcacttggactgacgacacagtacagcattggtcggtcttgatgggcataagcgcctgtggcctgtagaaacgtcacgccgcgttccatatcggccagaatgtcatcggcaattgcttgcgcgtggtcactgattacgagtagccctttggcggcgtaagcaccctcgagtgtgaagttcacaatccgggagaagacgtaagacgcaattaaggtatacatcatatgttcgatatcgaggtaactgagtgagagtgttaagactacgacgtcaaaaagaaggagggagcggcccattggcatccctttttctttttcgataatgcgggcaatgacgtcggtgccaccagttgtgccaccgaagcggtagataatcccactgccgaagccactacataaaccggctagaatagcggcgattaaaatatcgtggtttaaatcaattgtgatggggacacgttgccaaatccatagaaaaacggacatcatcgccgttccgtaaatcgtgtaggcgagtgcgcgtttaccgaggtaacgatagcctagaataattagcgggatatttaacaaagccgttgaatacgccgggtcgatatgcaaccaataccgtaaaatcaaggtaatcccggttaagccaccttcagccaggtgattttgaatgttgatggtcactagcccaaacgcgtagatcgcacagcccagcgcaatcaccgctaaatcacgactagtcgtttgccaagtatgttgtttcgtcatgtcaacgccccctttacataactcaaatatagcacggaatgggggttaaaaacagttggaaccactttggtggctgaagtggggtccttgattgtggtatgataaatagcatcagaaacagttaattgttagataagagggatagccatgaaagtaaccacctttgcgccggaatttgaagcggccctaccaatcttaaaacaaattgaagcggcgggttttgaagcctatttcgtcggcggcagtgtccgcgattatttattaggcttgccgattcacgacgttgatatcgcaacgtcggcgtatccagcagaagtgaagcaaatttttaaacgaacggtcgataccggaatccagcacgggactgtgatgattcttgatcatgggactggctatgaagtgaccacttttagaacggaaagtggctatcaagattttagacggcctgattcagtgacgtttgtgcggtcgttagacgaagatttacaacggcgggatttcacgattaatgcgcttgcgatgcgcgctgatggtgaaattattgatttattcgatggcctgaccgatctaaaagcgcaacaaatcagagcggtgggcaaagccgacgaacgtttccacgaagatgcactccgtatgatgcgtgccgtccgttttgaaagtcaactcggctttgcagttacaccagaaacacaaactgcgattgccaaacatgctgaactattaacgaaaattgcggtggaacgcattcatgtcgaatttgtgaagttgctccaagggattcagcggcaaaatgggttacaaacctttttaaaaaccgggttgtatcaatattgtccagcgttcgcgactgaagcagcgggactgaccaaattagcggcattaccagcgcaacagattcatgatgaagatacggcttggctactagtcaatgcattattgggtaaaacccccgccgccgccggcaaattattgaaacgctggaagagtgctaacgatgtgatcgatgcggttaaagcaggtttgggattattgccagccattttagaccaatcagccgatcagtgggccctttatcaagcggggcaacatgtattagacatcacgttaattgttgcccaattaatgaccaacgaatcagtcgcagttgatcagtggcaagcaaagtatgcggcactgcaaatcaagcaaaaggcggaactcgccatcaatggacaagtcttaatgcaaaatgggtatcaacctggtccgcaactaggaaaaatgttggcgcaactcgaaaaagccgtggtgttagatcaattaccaaacgatcaagcccaattattgcaatcggctgcacaaaactaagccattccctcagaaggtgtgttaaaataaccatgtaagcacattcagaaagggtgacaattgatgacacaacatgtttttaaggaattgaaattttattttagaaatggtgacgcttggaccgtcagccacaaagaattaaatgatatttggattagccgtgttaccaccagttatggccgcattaatggtggcccaatgcaagagattcacccttgcaagagtttcaaagccgaaatcttacctgaagcggatcatgtgaagtccgaagacatcaacaccggttctcttgaaatggggatgttcggtcgtgcaacgaagtatcaagacatcgaaaaactcgatttaatctttgaagatgatcaagatcgcgcaccaatgcaaatttatttcccattcaagaataaagataatagtggcttagataatatttatcaaagtagccaaatctcacaaaaaaatggtcggttgtacattgtgattgatgcagaacacacaattgcagatatgtaccctgaaatttaaacgttagctcctgacaatattgatcgttgtcaggggcttttttatttgtttacagtttacgacattctttttgtcattttgattgtcagtcgtctgattattcgctatgattgatggtaacgaaagtaaaaaggtgactatattgcaaacattgacagcaacgcatttaacgaagacttacggcgaaaaaacgctttttgaagacatttcatttttaatccgtgaaggggaccgcattggtttagtcggcattaatgggaccgggaaaacgacgttactcaacgcgattaccggcacggattcatacgatagcgggcaggttgaaacgcctaaccaatacgcgatgagttatttagcccagaaaccaagctttgatacgaacttaagtattatggcggcgatttttgccggcgataatccggttttcaagacgattcaaaactatgaacgcgtcttggcggcatatacgcaagatcccactaatccgaagttacagacgcaatacgaacaagctgatgcgcaaatgacgcaacaagatgcttggacggttgatacggatatcaagacgattttgacgcaattacatctaacggatttggatcaaccgattaatacattatctgggggccaacaaaaacgggttgggttggcacaagccttaattgaaagcccagacttattgattttggacgaaccaacgaaccacttggattttgattccattgaatggcttgaaaaacgcttagcacaatatcaaggcgcgcttttaattgtcacgcatgatcgctacttcttggatcgtgttgcgaaccaaatttttgaactcgacggtggtcaactctattcatataacggtaactatgaacaatttttaacccaaaaagctgatcgcttggaacgtgaacaacaagctgcccataagcaacaacaactctacaagcaagaattaacgtggatgcgcgcgggtgctaaggcacgaacaaccaagcaacaagcgcggattaatcgcttcaatgacttaaaggcgaatttaaccactggaccagacgattcggaagtcgatattcagatggggcaatcgcggttaggtaaaaaagtactcgaattaaagaacgccagtttaaaactcggcgatcgtcagattttggatgactttagtattctagttcaagcgaatgatcggattgggattagtggcgtcaacggggccggtaaatcatcactgttaaacgtgttggctgaacgcctcccacttgatagtggcgagttaattgtcggcgaaaccgtcaacctcggctactatacgcaacaaaatgaagacttagatcctaacaaacgagtgattgcatacttgcaagaagccggcgaagaagtcattggtaaaaatggggaccggatcagtgtcacacaattgttagaacaattcctattcagccgtcaaatgcacggcacattgattggcaaactttctggtggtgaaaaacgccgcttgtacttgttgaaaattttgatgcaacaaccaaacgtcttattactggatgaaccaactaacgatttagatattggcacgttgacgattctggaaaattacttggaaaactttaacgggactgtgatcacagtttcgcatgaccgttacttcctcgatcaagttgccgacaaactcttgatttttgaaggggccggcaagattagcaccgaagttggcctgttcagcgattacttggcaaaacaaaaagcaacaccaactaagtcagcgcctaaagcagcgacagcatcggttgaagaagcaccagttgcaaagaccaagcagaaattaacatacgccgaacaaaaggaatacgaacacatcgaagccgacatggaacaattggacgaacagattgaaaccatcaaagcagaaatgaacgcaaacggcgcggactatggtaaattagcagagtggcaggcccaaatggatcaacttaaccaacaactagacgaaaaaatgacccgctgggaatacttaagtgaatacgcaaactaaatgagtgcgttcaaaccgggtatattccgagcactagcctaacaaggcgaatgattgctgaaagcaatcgtttgacttgtgtagctaaacgcaagaacatggttttaaaagcacgttaaaaaactgagtgcgtttgaaacggtttgacgctgagcattaacttaatttggcgaattagcgatgtaatcgctgatttgacaaatgtcgttaagcgcaagcgccagtttcaaaaagcacgttaaaagaagtgcgttcaagcttgttcaacttttaagcattagcttagtgtgacgaataagcgacaaagtcgattatttggcatacgtcgctaagtgcagaaagttagcttgaaaagcacgttaaagaaaggaatccacatcatgtctgagcaaacctacttagatttagaacgtaccattttagaaacgggtcattataaagaagatcgtaccaacactggcacctatagtctgtttggctatcaaatgcgctttgatttaaacgaagggtttcctttattaaccaccaaaaaagtgccattcgggttaattaaaagtgagttattgtggtttttaaaaggtgattccaatattcgttacttactacaacacaataatcatatttgggatgaatgggcgtttgaacgttacgttcaaagtgccgattacacaggcccggatatgacagattttggtcatcgtgcccaaactgatgcggccttcaatactgtttatcgcgaccaaatgcaacagtttaacgaacggattttagacgatgaagcctttgccaaacaatatggtgaactgggcgatatctatggtaaacaatggcgtgcttggcaaacccgttctggggacacaatcgatcagattaaaaacgtgattgaacaaattaaaaccaatcccgattcacggcgcttaattgtctcagcttggaatccagaagacgtgccaagtatggtgttgccgccttgtcatacgatgttccagttctacgttaatgacggacggttatcgtgccaattgtatcaacgcagcggggatgttttccttggcgtaccatttaacattgcgagctacgcattattgacacatttgattgcgcatgaaaccggccttgaagtcggtgaattcatccatacgttgggtgatgcccatatttacagtaatcatattgaacaggtgaagacacagcttcaacgcccaattcatgccgcaccaaaattgtggctcaatccagataaaacaagcatctttgattttgatgtcgccgatattaaacttgaaaactatgaagcagaacccgcaattaaagcacccgttgcggtttaatgaggaggagcgccaatgttagcattcttatgggctgaagatcaaaatgggttaatcggtcaaaatggtcacttaccatggtcattacccaacgatcttgccaattttaaacacgaaacggttcatgaagtggtggtaatgggccggaaaacgtatgatagtttacccgtccaacccttacctggacgccaaaacattgtgattacgcgacaaccggatttagctgtggctgatggggtgtttgtgatgcacaccaaagcggaactgcttaaatatgagcaagccaacccgatgaaaaagatttttatcattggtggtgccgatatttttgcaatgtacgccgatgatgtcgattatctgtacgttacaaaaattgctgaatcgtttgaaggcaacgtttatatgccaaaattagcgatggatcagttcgaattgatcagtcaaacacctggtgtggtggacgaacgtaatcgctatgcgcatacgtttgaaatctatcaacgccgttagaaagattcaattaagggcggtcgcagcgatgtaaccgcctttttgcttgctacaaaagtgacaactggcttttttttaatcagtaacttttggtgaaaaaagcgtgattgtttgatatactgtcaatagacataatcatagaaatcacggggccgtttattgcccagatttcaagatagaaagcgtggctgaagtaatagtggctaatattaaaattgtaacggattcatccatccaactcactcctgaagaaattaaagaacatcatattacggttattccgttgacgattatgattgacaatacggtgtatatcgatggtgaaaccattacccgcgatcaatttatgactgaaatggcaagtgcgagtgccttacctaagacgagtcaacccgcaatcgggaattttgtcgaaacgtatgaacaattagcggctgatggcagccagattttatcaattcacatgctacgagcaattagtggcactgttgatacagcccgccaagccggcgagatggcgaaagcagatgtaacagttgtcgatagcgactttaccgaccgtgcaatggcattccaagtgttaaaagcggcagaagtcattgaaaacggcggtagcatggatgatgctttagcagccattcaaaacgtacacgatcatacgaagttatacatgggtgtgactgatctaaccaacctcgttaaggggggccggttgagtcatgcggctggtgtgatttcaagtttattaaatatcaaggtgatccttgaagtggctgatagcgaattaaaagtgttacgcaaaggccgggggatgaagaccattacgaaattcatcgatgaaatggaagctgatatgcgcgacttaaagattcgggcaatcgggatttcacatgcggatgggctagaattgagcgaaaaaattaaagcacaattgcaagtagtattcccaaacatcgaaattcttgtccggacaactgatccagtgattgcaacgcatgcgggtgcaggcgcatttgccgttatgtactacacagaggattaacaagattacaattaatgtattaacacactaaggctggttgacatttaattgtcccagccttaactattatctagaaataaccgaggtgtcacgtttgaagaaagcacgacagattttaattgatttaggcttatttgctggtgcgattttagtggtctttattatctggcaactattaacgccacggcccaaccaagcgcctaagacggtaacatcaacgtcttcagcggataaagtgatcaaatcaaaaccaaaaccaaaaaagacgttgcagttggttgcgattggcgattcattgacgcatggtgttggtgatgagaccaacaaagaaggctatgtgtcattagttgccaatcagattcagcaagcaaccaagcatcccgtcaagaccgccaatttcggtgtgacgggcgataccagtgtacagattactaaacgcgtgcagaaacaaaagccgctacagcagcaattggcaaaagctgatattgtgacgctaactgttgggggcaacgacctaatggcagttttacagaataatttttttgagctgaatcaacgtcggattacgactggtcagcaaaaatatcaagcgaatttaaccacgctgatgatgcaaattagaaaatataatcctgatgccccaattttcatcatgggggtctacaatccgttttatgtctatttccctgaaatcactgggatgtcaaaggcggttgctgagtggaatcagaccgccaaaacggttgctaatgatttcaaagatacgtattatgtcaatagtgatcgggtgttgacacggggcgatgggcattttgtcaaacagactaaatcgctcgctaaaatggatagtgcacagttgcaaaaaacattagcggctaacgagcatttgaacccctatatcagtccagatgatcatttccatcccaatcataaaggttatcaatgggtcacaaaggccttttggcaagtgatgaaagcacacaagcaaacgtgggattagagaaaggataggttatgacaaccagacaagcacatcaagcagcacagaaaacaacaactaaacggaccatcaattattggaaatacagtttcatcgtcttattagcagtcgtgatcgggacagttggtcttgtcggctacaacgtgacagcccctaagactgaaatgattaaaactgagaaaatcatcaaagctgatagcacttttgaaattcagatgcataagagacaaatcaatagtttagtcacctattatttacaaaactacttggaagattcaaagattaaataccaactcaccctggatcagcaggcgattttatctggtcaattcaagttcttagggtttccggtcgaattcaacctcttttttgaaccgtacgttttagaaaatggcgacgtccaattacgcgccaaacaattagcagtcggacaattgaaggtgcccatgtcgtttgtctttaattacatcaagcgtcaatacaaattccccaaatgggttattttggatgcacacaagagccggattacattacgcctaaatgagttcaagctcgaaaacgggatgcaagtaactgctaaacatatcgatttgaagaatgataagattgatttaaacgtctatatcccgctaaaaaataagaaataaggtgttcagatgaagcagagtttttatcgttacctcatgacccaacgtgatccgaataattatgaaccagttccccaatttgccaacaatgccttttttgaccaatctttccctaaacaaagcggcgattatgaaacattaacgcgctatttggaacttaatggcagctacctcccgagtatgacgatttttgatgaggcgtatgaagcctatcaggaaagcgaacaagcctaatgacttccccgaagcagaaattgtggcggggatgggccattaccggctattggcttctcgcatttttactggctgggacggtagcgattgtgttacggtcgttcattctggtccccgcatcggtgtcagggcaatcgatggccccgacgcttgagtcagcggaccaactcttattacgcactagtgggcccatcaagcgctttgatgttgttgtcttcacccgagctgatcaaacaacttatgtgaaacgggtgattggtctgccaggtgaaaccgttgcataccgcaatgaccagctgtacatcaatggacggcatgtcgacgaaccattcttgaatcaggccaaaaagaaaccagggattttaacatcagattttgaattaaaaaccttaatcggcgaaaagcagattccaaaagatgagtactttgtattgggtgacaatcgccagatcagcaaagatagccgcttgtttggtacgatccaccgcgatacaatattaggccgagcagtggcggtctactggccgattaaagatatacaatctttaaaataataattaaaagctgacatactctagagtgtgtcagcttttttgattatcgagtgctaatgatcgtatgaaatgtactgaatatgatgcttaactgaaaaaatgatacgcttaattggtggatgttgtagtccggaattaaatttaacccgtcagccagacatcaggtatgatagaattaagaataatacaatcagtgacaaatattaagaatgatgtatatcgcttaactagcaataaaggagttattatgacaattcaatggtatccaggccatatggcaaaggcccaaaaacaaattaaagaacggctcaaagcagtcgatttgattctcgaaatcgtggatgcacgggttccagaatcttccattaatccgatgattgcagaacttggtcaaaacaaaccgacgctcttgattatgaacaaagcggatatggcagatgccaaacgcacacaacaatggattgaaacatttaaaaaacgggggattacagcaatcgcgcttgatgcgcaacataaatcaaaattaccgcaaatcgaaaaagtagcacaagaaattttggcagacaaacttgctaaaaaacgggcaaaagggattcttaatccggtgatccgtgcaatgtgtgttggggttcctaacgttggtaaatcaacgattttgaatcgcttggtgcaaaaaaacattgcggtaacaggtaatcgacccggtgtaaccaagaatcaacaatggttaaaagcgggccaatcactcgaattgttagatacaccaggggttttatggcctaaattcgaagatccagctgtcggcaataagttggccttaactggtgcgatttcggatgcaatttatcacccggatgatgttgtggtgtatgccctcgattatttcaaggatttctatccgcaacaattggtaaaagaataccatgtgacgccggctgaacttgaaatgccagcgcctgatttaatcatggcattgaccaaacgactaggttttaaagaagactacgatcgcttctgtatgaaattcatcacggacgcgcgtaagggtaagttagggcgctttacactcgatatcgttcctgtggaggcgcactaatgaccaaaccagaatcaattgctgccattaaggcacgcttattagacgacatttcagaggaagaagtggcgctcttacgcagtgatgcgcgtgctggcgtgcagaagttactcgttcaatatgacaagcggatggctaagttagcggcgcaaaaagcggcgtttatcgaacgacgccagctagaagaaagtttatggccagattatcccttgattgctggaattgatgaagttgggcgcggcccattagcgggtccagttgtgacagcggccgtcattttgccacatgattttgacctatggcaagtcaacgactctaaacagctttcgtttaaggtgaaacaagaactgtatcgcggtatcatggcacaagccatcagtgtcagcattgggattgccgatgcaccacggatcgaccaagagaatatctatcacgctacggaactggcgatgggcgaagctgtcgctggtttagcagaacaccccgattacctattggtggacgcaatgaccgtgccgacagacatcccacaagaaaaattgattaagggggatgcgcgcagtattagtatcgcctcagccagtattgtggctaaagtgattcgggatcaattgatgattaattatgatcaacagtatccgggttacgatcttgctaataatatgggttacgggacagcgaaacatctcgctggtttagctgaattcggtgttacgccaattcaccgccgcagtttttcgcccgttaaagacgccctatagaaaataaaacagctcctttacgaagataaacgtaaaggagctgtttttttgtgttgactaaaaagcaattattattgaaagtacacctggcagatgggtttggccccatcagtgaattacgcttagccgcatggttagtaacgagtcacaattgggctttatcggcattggagattgcgcagattgcgtgtttaccggagcgatattggctgacctttcagactagttttgacagtctagctctgcaacagaagtgtgccacgcatgaacgttatgttcagtatctgacgattctagaagcagattatccgcaacggttgttagaaacccattgtccgccaacagttttattttatcgcggcgatttaagtgttttgaaacagccatgtgttgcggtggttggtgcgcggcaagccacggagtatactaagcaagccctgcagcatttattgggattaccacaaacaacgacgattatcagtggtttagctcaaggggcggatgcgatggcgcatgaagttgcactccaaaaagggttacgaccgattggcgtgattggaacgggcttgaattgttattacccaccacaaaacgaacacttgcaacaggcggtcgctgaaaaagggttattgatatcagaatacggtttggacgtaacggctaagaagcaccacttcccagcccgaaatcggattattgccggactttgtcatagtttagtggtcacagaagcccgccaaaaaagtggtagcttaatcaccgctaatttagcattacaagccaatcgtaacgtatatgccttaccgggccaggttaatcattcattatcggcaggctgtaatcaactgattttagccggtgcaacgccgcttttaaatcaacaattgttattggacgagttgcattattttgattgagggttaattgttgacaattctgcggcatgttgttaatattaaagtcacaagttacttataaagtaacaaatggaattcaaaggggatttttaatatgaaatatgcaattacagcagtgacaggtcgttttgggcaagtcgcaatgaagacgttggctgacttagtgccagcagaacaaatcattggattagcacggaatactgaaaaagccactaaaatggtcccagctggtgtgaccgttcgtcccggtgactataacgatgttgccacattaacggaatcactcaaaggcgttgaccggttattattcatctcctcacaacctggtggcgatgtgccccgtgcgcaacaacatttaaacgtgattgaagctgctaaaaaggctggcgttaagtggattgcttatacgagtttcccacacgctgatcaagcaacaggtgctttagcaagtgatcacattcaaactgaaaaagcattggcagcatcaggcattgatcatacattcttacgcaataactggtatcttgaaaacgaaatggatagcattaaaggcgcattagcaggtcaaccatttgtttatggcgctggtgaagggcatgttggttgggcactcgaacacgactatgctgaagctgcggctaaggtattagtcaacgatcaaccaaaagcgatttatgaatttgccggtgcgccagccacttatgcggatttagctcaagcgattagcgagttgactaatcaagaatttaaggtagtatcattagatgcggctgattatcgtcaaagcctcgaagacaacggcttacctgctgaagtcgctgaaattgtcactggtattcaaacaatgattcaagatggtgatttagatgaaaccacttctgatttacccgatgtcttaggccgaccattaccttcattaaaagaagcgttacagacgattattaaataagcctgaattgatttcaaaaaggcggttgaaccatgaaatattctcataaacttagtgatgccatccatattttggcctatgtcgatatttttcaagatggtgatttatcaagccaagcgattgctgggagcatcgagtctaatcctagtttagtgcggcggctaatgtcactactggtgaaggcggatttattagcgactaaaccggggacgattgcccctaaattagcgcgcccagcggaacagattacaatgttagccgtttttcaggcgcttgatacagatcaacggttattacacgttgatgaaaaaacaaatccagattgtttaattggtagcaacattcaagcaacccttgatgcggcttatgatcaggtgcaaaaagctgcggaagcggagatggcaaccatcacccttgatcaaattattgcggggattcttgaacgcgatgcacaaaaaaatagtttgtcagtctaagttttttatctggcgactatataatagaagaaatcggggttcgaccaagtggttgaaccccgatttttggtgtgatttgtacgtttgaaaacaatttctctttggcatactgccaaacctatgctatgctttaagctgttaatatcaagcatactatcagttgacaatcgtcaaggtagtgttttatgctaatgaacgatttgaacaaagcgttctgttgaaaggggtttgtccatggcaggcaaaaatttagtcattgtagaatcacctgcaaaggccaaaacaattgaaaagtaccttgggcgcaactataaggttgttgcaagcaagggtcacatccgcgatttaccaaagagtcaaatgggtgttgattttgaaaataattatgaacctaaatatatctcgattcgcggtaaaggcgaaacgattaaagaattaaaaaagcaagctaaaaaagttgatcatatctatctcgcagccgatccggatcgcgaaggcgaagcgattgcatggcatgtttcccatattttaaaactcgatccaactgaaaaaaaccgggttgtctttaacgaaattaccaaagagaccgttaaaagtgcttttaaaaatccacgtagtatcgatatgaaactcgttgatgcacaacaagcgcgacgcgtgcttgatcggattgtcgggtattcaatcagtccattactctggcaaaaggttaaaaaaggcttgagtgctggtcgggttcaatccgttgcgttaaaactcgtgattgatcgtgaaaacgagattaaagcctttgttccagaagaatactggtcattggatgcggaatttaaaaagagtcgcagtaagtttaacgccagtttctacggcgtgaagggtaagaaattaccccttagcgataatgatgcggttcaagcgattttgaaacaaatcgataagactaaggatttcacgattgaagatgttaagaaacgggaacgcaaacgttttgcagccgcaccatttacaacgagttccttgcaacaagaagccaaccgtaagttgaacttcagaacgcggaaaacaatgatgcaagcccaacaattgtatgaagggattaaccttggtggcaaagaaggcacggtcgggttaatcacttatatgcgtaccgattcaacccggatttctaccggtgctaaacatgaagcgtcacaattcatccatgacaattatggtgaagaatatgcggcattaaaggcgcataagacgaagaatcctgaaggtgcacaagatgcccatgaagcgattcgcccaacgtcagtgatgcggacacctaagagcttgaaagacgttttaactaacgatcaatataaaatctataacttaatctggtcacggtttgtcgccagtcagatgacaccagccatttttgatacggtcgcagttaagattgctcaaggtgatgtcttattcaaggcaaacggctcacaaatgaagttcccaggattcacgaaactctatgtgtcatcacgtgatactgaagactctgctaaggataatgtcttaccagaacttgcagttggggatgcggtgaaactcgttaaaactgatccagcgcaacattttacgcagccaccagcacgttattctgaagccaatttagttaaggctttggaagaaaacggtgttggtcgaccatcaacgtattcaccaacgatcgaaacgattcaacggcgttattacgtgaagttaaacgcaaaacgctttgaaccaactgagttaggggaaatcgtcaatggtttaattgtcgaattcttcccggacatcgttaacatcgactttacggccgatttggaacatcgtttggatgaagtcgaaacgggtaaagaagactgggtcaaggtgattgacaacttcttcaaaccgtttgaaaaagaagtcgaaaaagcgagtgaacaaatcgaaaaagtacaaattaaagatgaaccagctggctttgactgcgacatctgtggtgccccaatggttgttaaaatgggtcgttatggtaaattcttcgcttgcagtcgcttcccagattgtcgcaataccaaggcaatcgtgaaggaaatcggcgtcacctgtcccaaatgtggtaaggggcaagtcatcgaacgtaaatcgaagaagaatcgcttattctacggttgtgatcgttacccagattgtgattttatcacatgggataaacccgtcggcagaaactgtccgaagtgtgaacactaccttgttgaaaagaaaattaaaggtggcaaacaagtaatttgtccaaacggtgactacgaagaaaccgtccaaaaataattagaaaaatggagactagcaaatgagcacagaaccttttgtaaacgtgattggtgccggattagccggttcagaagcagcatggcaaattgcccaacgcggtgtgaatgtgcacctctatgaaatgcgtcccgttaaaatgacaccggcgcaccatacagaacaattcgcagaattagtgtgtacgaattcgctccgtgcgaaccaaattaccaatgcggttggcttaattaaagaagaaatgcgtcacttggactcattaatcatcagtgcggctgatcaaaatgccgttcctgctggtggcgcattggccgttgaccgcacaccgttttcacaaacggtgacggatcgcttagccaatcatgaacgtgtcacagttcatcatgaagaattaaccgattttccagaaggtcctacgattgtggccactggtccattaacgtccgaaggcttagctgaaaaaatcagtgccttaaacggcagtgatggcttgtatttctacgatgctgcagcgcccattttggataagaacagtatcgatttcgataaagtttacctcaaatcacggtatgataagggcgaagctgcttacttaaactgtccaatgactgaagaagaattcgaaaacttctacaaagccttgattagcgctgaagttgcagaaatgcatgactttgaagaagaaaagttctttgatggctgtatgccaatcgaagtgatggccaaacgcgggattaagacgatgttattcgggcctttgaaacccgttggattggaagatccgaatactggcaaacaaccatacgccgttgtgcaattgcgccaagacaatgcggctgctagtttgtacaacattgttggtttccaaacacatttgaagtggggcgaacaaaaacgggttttccgcatgattcctggtttggaaaatgctgaatttgtgcggtatggtgtgatgcatcgcaatactttcatgaaatcaccagatgttttattaccaacctatcaatcaaaacaacgtgacgatctattcttcgctggtcaaatgactggggttgaaggctacgttgaaagtgccgcttctggactagtggctgggattaacgccgctaaactggcgttggaccaaacaccggctgttttcccaacggatacggcgatgggatcaatggcgcactatattacccatacgagtgccaaacatttccaaccgatgaatgcgaactttgggattttcgaacctttgaaacaacggattcgcgataaaaaggaacggaaccaagcacttgctgatcgcgcacttgaaagtatcgaccaatttaagacgacactttaattagaatcttttaaatcccgccaggcttgtggtaaagtaatactaatcaagcttggagggatttttttggcgttagaacaagaatggcttaatctttttttacagtacttagtggtcgatcggcattactcgccagaaacccaaaaagcttatcaagctgatattcagatgttcagtgcttttttaaccgctaacggcggcttagcgtcgtttaaacaggtcacgccactggacgtgcagacttacttgaatgaaatggatcaaaaagaatatagtcgtgaaactgtcgcgcggcgaatttcgagtttgcggtcgttttaccggtatttagtgaaaaatgagttcgtgcaaaccgatccttttgaagctgttcaattaaaaaagcaacagcataagctgccgcggtttttttacgaaaaggaaatggacgcgctatttgctgccattgatggggatcaaccactcgatcaacggaatcgcgccatcttagaattactgtatgcgacggggatgcgggtgagtgagtgcgcgcagttgacggtagcacaaattgatttcggcttacgcgtcattcttgttcatggaaagggcaataaagatcgctatgtaccattcgggcaccatgctgaacgtgccttgcaagcttatttaaaagttggtcgtgttcaattgatggccaaaaaacaattggaccacgatgtcgtttttgttaatcatctcggagcgccaattacaagtcggggaattgaatacattttagatcagattatcaagaaaacaagtttaacgagtgacattcatccgcatatgattcggcatacctttgcaactcacttattggatcacggtgctgatctgcgaacggtgcaggaattattaggccacagtagtttatcaaccacacagatttacacccatgtcaccacagcccatttacaaaaagattaccgccaattctttccccgcgcgtaaaactcggactaaagtttgatttttttcaacgaaaaatagactaatattagcacacagtcttaaagactgctaaaatagaagtgcgttcaaaccggttatgttctgagaattagcctaacaaggcgaatgattactggaaacaattgtttgacttgtgtagctaaacgcaagaacatggtttgaaaagcacgttaagaaagaagtgcgtcatcaacgggttgtttttgagcatttgcctaatcaggcggattaccggcaacgccggtgatatgacagatgtagcaaagcgtagaaagcagttgatgaaagcacgttaagaaaaaagtaagtgctttcaagcttgttcaacttttgagcactagcacaggggagcgaattagcgataaagtcgctgatttgattcacagcgctaagcgcagaaagttagtttgaaaagcacgttaatccccgcccaatccccaaacaacgttaggagtaattcatatgacaacaatttgtgcagttaaacataatggtaaaacagctatcgccggtgacggtcaagtcaccatgggcgaaaaatttgtgacgaaggattctgctaaaaaggtccgtcgaatttatggtaatcaagtcgcaatcggctttgctggtggtgttgcagatgcctttacgctacaagaatggtttgaacaaaaattagaaaagtattcaggcgacctgcaacatgctgctgttgctttagcgcaagactggcgtaaagatccaacgcttcaaaaattagaagcgatgttgattgcggtcaatgcgactgatattttattaatttcagggaatggtgaagtcatcacccctgatacgctatcggaatcaggtgatcaagtgattgccgtgggttcaggcggcaatttcgcccaagcagcagctaccgcattattacttgaaggaaaagatgacttatccgttgaaaaaatcgtcacaaccagtgttgatattgctggtggaatcgatgtttacaccaaccacaacgtgattgtcgaatcattttaggaggtcgcacaatggacttaatgaataaaacacccaaaacaatcgttgccgaacttgatcaatttgtcattggccaagatcaagctaaaaaagccgttgcggttgcactatacaaccgttatcgccggatgcaactcagtgcaaaaatgcaacaagaaatcacgcctaaaaatctattaatgatcgggccaactggggtcgggaaaacagaaattgcccgacggttagcgaaagttgtcgatgccccatttatcaaggttgaagccactaaatttaccgaagtggggtatgtgggacgtgacgttgaatcaatggtccgcgacttagctgatgtggctgtgcatatggaagaaacagaacaatttaaaaacgttcgtgctaaggctgctcgtcaagcagacaagcgcttggttaaactactagtaccgggcattaaaaaggaacaacgtaagaacaataacaacatgaatgatttaatgaacatgtttaacgcgcttcaaaaaggggaaacaccagctggtttcggacaaactgaaccagaagaagtgacggatgatatccgtaacgaacggttatctgttaaagaacagttagataaaggcttgttagatgaccgggaaatcgaaattcaagttgatgaaccgaaaaaagttgccccaatgaacgatatgatgggccagatgggaattgatttaaacgatactctgggttcaattatgccgaagaaaaaaattacgcggacggtaacggttaaagaagcgcgtgaagttttcattcaagaagaatccgctaaattagtcaaccatgccgatatttaccatgatgcgctccaacgtgctgaaaataccgggattatttttatcgatgaaattgataaaattacggctggtggcaaaaaacaatctggtgaagtctctcgtgaaggggttcaacgtgatattttaccaatcgttgaaggctcacaagtcaatacgaaatacggtgttttgaagaccgaccatatcttatttatcggttcaggggcgtttgctgaatcaaaacccagcgatttaatcgctgaattacaaggacggttcccaatccgggttgaacttgaagatttaactgaaaaagacttcatccgaattttaacggaaccaaacaacgcacttgtaaaacaatacatggcgttgattggcgccgatggggtgcacgtcaccttcacgatggaagcaattggccgcattgctgcgattgccttccaagttaaccatgataccgataatattggtgcgcgtcgtttggccaccatcttagagaagctattagaggatattctctttgaaggtcctgacatgcagatgggggatatcaccatcacagaacaatatgtcaacgataagatcggtaatattgcagccgataaagatttaacccgctttattctataatttttaaaaggtggtattttaagatgatccaaattgcaaacgaatttttaacggtgaccctcagtccaaaaggcgccgaattacaaagtattaagggcgccgtttcggggcttgaatatttatggcaagctgatcccgatgtttggggccggcacgcacccgttttattcccattcgtggggcgttcaaaagcagaccaatatacgtataatggccaaacctatccgatgggtcaacacggttttgcacgtgatcgcgaattcagtatcgaagaacaatcggaccacgccgtgactttcttgttgaaagcagacgctgacagccgggccgtgtatccatttgaatttgaattacgtgtgagctatcgtgttcatgatatgcatttgacggttggctatgacgtccgcaatgttgcgccaagcgggccaatgtacttctcaattgggggtcatccaggatttaaagtcccattaacggatgacacgcaatttgaagattatttcttagactaccgcccacaaaaatcacgggttaagatcccattgcaaggggccttcattaatttgaacgaccggacgttagcaccaaccgacgtcgcaacggatatcaatcaccaattatttaaaaatgacgccttaatctacgaattaaagggtcaagccaatgaattcagtattcgttctgaaaaaacggaccactcagtgaccatgaaattggctggcgccccattcatcggtgtttggtcaccttatccaacagaaggcaaccttgtgtgccttgaaccttggtgggggattgcggataccgttgacgcaagcggtgaactttcagaaaaatttggtgtcaacgaactggctgcaggtgaaacgtttaatgcaagttatgaaattactgttcgttaatgaatgattaaaaaaacgcacttaccaagatggtgagtgcgttttttagtaaactggctgtaggcgggtaacgcattctaaacgcactctgctagtttttccagtagttccatgctaagatataagttataaaatcataggttaggtagggtaagtcatgactgaagaaaagaagtattacggcgcggatgccatcatcgatagtttagtaaatcatgatgttgagtacgtgttcgggattccgggtgcgaagattgatcgggtttttgaacgactagaacatcccgttaatccaaagacgcccaaattaattttgacgcgccatgaacaaaatgcagccttcatggcggctgggattggtcggattacgggcaaaccaggcgttgtaatggcgacttcaggccctggtgccagtaatttagcgacgggggtcgtgacagcaacggcagaaggtgatccagtcttagccattgccggtcaagtgaaacgcgctgatttgttgcgactaacgcatcaaagcatgcgtaatgccgctttattcgcaccaatcacaaaattcagtgcggaagtccaagaacctgagaatttatcagaagtgattgctaacgcctatcaagaagctgaatccgctaaacagggcgcaacgtttgtcagcatcccacaagatgtcacggactcagaagttcattctaaagtgattaaaccgctaatggcgcctaaattagggccagccagtcccgttgaaacgacgcttttggcacaacggattaaagaagcaaaattaccagtacttttagttggtatgcgcgcttcttcaccagaagtgacagcagcgattcgcaatttagtggctgaaacccacattccggtcgttgaaacgttccaagcagccggtgtcatttcgcgtgatttagagactgatttttatgggcgagttggtttattccggaatcaaccaggcgaccgcattctaaaacgcagtgatcttgttattgcagtcggctatgatccaatcgaatatgaaccgcgtaactggaacgctgaaagtgatgcgcacattatggtgattgatgatatgcgcactgaaatcgatcataatttccaacctgaaaaagaattggtcggcgatattgcgcagaccctagactttttattaccttatatgaaggggtatcaactagcgggcgatgtgcgtgattatttagttgaattgcacgcagaactcaatcaacgtgacacggcacctgaaatgacgaccgataatccacttagtcatccgttgaacattatttcagaactgcaagcacgggtcaccgacgaaatgaccgtcacggtcgatgttggtagtcattacatctggatggcgcggcattttagaagttacgaaccacggcacttgctctttagtaacgggatgcagaccttaggtgtggcattgccatgggcgatcagtgctgctctagtgcggccaaatacacaaattgtgtcggtttcgggagatggtggcttcttattctcaggtcaagacttagaaactgcggtgcgtctgaacttaaacatcgtgcatattatttggaatgacggttattatgacatggtaaaattccaagaagaaatgaaatatggcgaatcagcggccgttaagtttggtcccgttgattttgtccaatatgcagagagttttggtgcaaccgggttacgggtcgaaaaagccgcagatcttggtaaagtattggatcaagcctttgccattgatggtcccgtccttgtagatgtgcccgttgattacaaagataatcaattattaggccaagcattattacctgaccaactcgtttaatttgaggaggaaaatcaatgacaaatgatgtcaaacgcgtttatcaacacggaacgttagccctattaattccggggctctttacagggacaatgaccgttgctgaattattaacccatgggaattttggaatcgggacggcgcacggtttagctggcgaactggtcttattagatggccatgcttatactgtgaatggggatggccaagtgactgaactcgcacctgatgcgacagttccatttgcgacagtgcattggcaagattcatcattacctacacaagcggttcatcaacgcacaaaggctgagttagaaacgcaaattctagcgcaagcaccgttaaaaaacttgttttttgcggttaaaatgactgggactttcaaagtcatgcatacgcgggccgtccaaacacaacaggaaccttatccgaatttgactgctgcaacccgagtgcaaccggagtttgaacaaacagacgtaacgggcacgttgattgggtattatgcaccagcgctttatcaaggcgcagctgttgcaggctatcacgtacacttcttaaacgatacgcacgactttggcggtcatattctagactataccgtggtcgatgctcaaatgacgctccaaccgtttgaaacgtttgaacagcacttcccaagtgataacgaagcttttttaaagagtgactttgacttacaacaagtcaatgccgatattgaagaagcagaacactaaacattcaaaaagcccacggatttttccgtgggcttttttgtattttaagcatggtggttaattggaccgtacttgtggccgacttcaatcgggttagcgatggcgcggtgaacaaattgtttagcggtcttaatggcagcctcaattgtctgtcccttagcgatttcagcacagatgcaagctgaaagtgaatcgcccgtcccattaatatgggtggtttcaacgtaaggttctgatagccaaaattcttgtccatcggcaaggcaaacgtagtctgtaacgattgattgtccggcctcgtgatggcctttaatcatgacgttttttgcgtccattgccaatagtgcttggccagcagcttggaaatcagcaggtgtcttcagttcaataccagttaatttttgcgcttcgtagaaattaggcgttaggacagttgcaaggggcattaattctgtctttagtgtgttaaaagcatcatctgccaacaacaatgcttcatgcttggtaataatgaccggatctaacactaggggaccaaagtcatgttttttcaactgattagcaacggttagaatggtctcacggtcggttaacattcctgttttgcaagcgcgaacctgaaagtcggctgcaattgcttcaaactcggcatcaataaagtcgggagacagtgcttggctagcacgaatcccatatgaatttccagcaacacaggctgtcaaaatgctcataccataaacattacgggcaaaaaaagtatttaaatctgcttgcgcaccggcactgccatcagaatcggaaccggcaattgtcatgacttgcggaaagctatttaacattatcaacatctcttttccagagcggacggaacgtccatcacttaatatatcctaatattagtataagcttttaggtgtccttttttcaatcagcagaagacactaattaagtgaatttcgtgtatactatgaattaaataattgtcaggagggacttatgattcaattaaaaatcgaacgattatcttatcaggttgatcaacaagtgattttaaccgacattaatttaaccgttgaaaaaggcagttacttaacgattacaggaccttctgggggtggtaagagtaccttgttacggttaattgcggacttactaacgccgacaagtggcaccattttattaaatgatcagccactgacccagtttagtcccaatcagtatcgacaaaaggtttcgtattgttttcaacaagcaacgttatttggtgaaacaatcggggataatttacgttttccatacgagattcgtaatttaccggtcgatatggcagcaattgaaaaagcgttggcagcggttgggttagccaacatgccactaacgaaaaaaattaccacgttatcgggcggtgaaaagcaacgaattgccttgattcgtaatgttttatttccaccggaagttttattacttgatgaaattacgactggtttagatgccgctaataaggcaattgtattggcgtttgtccagcacctcaatgaggattgcgggctcacaattattgccattacccacgatacagaagaattacaacggaaagggcgccaggtgcaaattgttgctggcgaattggtaaatcaagatgaacttagccgttaatggtctttcactgacgtttgctgtgacattagtgtttgtcgcattagtcattagcttccatgaaaaaatcggtcttgaaaaagatatgattatcagtgtttttcgcgcaatcattcaattatttatcgttggttatttactgaaattcatttttcatattaacgatgtgtggctaacgttattgatgatgctgatcattatttttaacgccgcagcaaatgccaaaaagcgggcggggaaactacgcaacgggtttccaatttcatttatcgcaattttaacaagtactggggtcacgttaggattacttgttttatctggggcgattaagtttattccatcgcaaattattccaattactgggatgattgcttccaactcgatggtcgccattggcttgagttaccgcagcttactggcgcaatttaaggatgaacggcaacctgttttggaacgactcgccttgggagcgaccgctaaacaagcatcaattgccattgttcgtgagagtattcgtacggggatgtcacccacgatcgattccgctaaaacgatggggcttgtcagcctgccagggatgatgtcgggcctgatttttgccggaattgatccagtcaaggccattatgtaccagatattagtgacctttatgttattatcggcaacgagtcttggttcagtgattgcgtgttacttagcttatcgatcattttacaatgaacgggaacaattgattgatctttaactgattgcacaaaaaaacgcccgttcggcgtttttttagttattgatgtttttgtttatagcgatagtataggccaaatggcactaagttttcagtgccatttttaatgcgttgtagattttcgcggtgccggtagaccaggaaaagtaagaccaaggtcgcaatcgaaccgagtagccaatcatgcgtgtaaaacgataaaatcgcaatcatcaatggaccgaggatgctagccatgctaaccatacttgtaatcaggatgacactgataaagatggtactggcaattacgaagaaaagtggattgtatgccagtaagatgcctgcgctggttgcaacggcttttccccccgtaaagtgtaaaaagatggagtaagcatgaccgacaacggccgctaagccgacgattaagaccaatgcatgattggggatgtgaaaaatcatcggtaggctagcagcaagtgtgccttttaaaatatcaagaaataaaacggctgtcccagcgattgggccgagcacgcgatacgagttagttgtgccgatattatggcttccagcatctcggggatctttgtgacagaaaacgcggccgataataacgcctgatgggaacgaaccgatcaggtacgcaagaataaagataagactaagtttcatgacaaaaactcctatttgtggcatttgtttcccctattttagcattttgacaagggaaaaggaatattgtatgttagaataggtgaatacgaacatacatttgtattggcaagaaattttaaatttttgattgtaaaatcatccaaacttgttgataatataccttatctgttcatttttaaacaaaggagtcatacttgaatgccaaatcaaaaacaagattataatgataattcgattcaggtcttagaaggtctagaagcagttcgaaaacggcctggcatgtacattggctcaactgacggtcgcggcttgcaccatttggtgtacgaaattgtcgataacgctgtcgatgaagccttggctggttttggttcagaaatcaacgtcgtaattggcgcggataatagtattagtgtccgtgatcatggtcgtgggatgccgactgggatgcaccaatctgggattcctacgattgaagttattttgacagtgcttcacgcaggtgggaaatttacccaaaacagttataaaacatccggcggtttgcatggggttggcgcgagtgtcgtcaatgccttatccgaatggttgaccgtccgcgttgtgcgtgatggtgttgcctacgaagaacgctttgaaaatgggggccacccggttggtaccttgaaaaaagttggcaaagctaaagaaccaaacggcacgttaattacgtttaagccagatgggacaatttttcaaacgactacttataactacaataccttagcagaacgattacgcgaatctgcctttttactcaaagatgtcaagattacgttgaccgatttacgcgctgagccagcacgtgaagatgtcttccattacccagaagggattcaatcatttgtcgattatttgaacgaagataaagatacgattggtaataagttatatttcgaaggcaccaaagaagacattgaagtcgaatttgcgggtcaatataacgatggctactccgaaaacatcatgtcatttgtgaataatgtccggacaggtgatggtgggacccatgaagctgggatgaaagccggcttaaccaaagcttttaacgattacgcccgcaaggtaaacttgctcaaagaacgggataaaaacatggaaggctccgacgtacgtgaaggtcttagtgccgtcttgtctgtccggattccagaagaactcttgcaatttgaagggcaaaccaagggtaagctaggctcgccacaagcgcggacagctgtcgatagtttggtttatgaacaaatgagctttttcttacttgaaaatggtgaatttgcgcaagccttagtgcgtaaatcattaaaagcacgcgaagcacgtgaagctgcgcgtaaagcacgtgaacaaagtcgaaatggtaagaaaaagaagaaatccgatggcttattatctgggaagctaacaccagcgcaatcgaaaaatgcggcgaagaatgaattgtacttggtcgaaggggattctgctgggggttctgctaagcaagggcgcgatcggaaattccaagcgattttgccattgcggggcaaagttttaaatacccaaaaagcgaaattacaagaaattctaaaaaatgaagaaatcaacacgatgatttacacgattggggccggagtcggggctgaattcaaacttgaagacagcaattacgataaagtcatcatcatgaccgatgcggataccgatggggcccatattcaaattttgttgttaaccttcttctaccgctatatgcggccgttaattgaagccggaaaagtctacattgccttgccaccattgtataagctccaaaaaggtgctggggcaaaaacgaagattgcctatgcttggactgatgatgaattgaaagtcgtcgctaaagaaatgggtaaaggctacagtcaacaacgtttcaaagggttgggtgaaatgaatgctgatcaactttgggataccacaatggatccaacgagtcggacgttaattcgggtgcggattgatgatgcagccttagctgaacgccgcgtcacaacgttgatgggcgataaagttgaaccacgtcggaagtggattgaagaaaacgttaagttcacaatggctgaagatggtagcatcttagatacaacgaatggtcaaccagcaccgacaacttcaagcgctgaagtggatttatttgaccaattagacgaatagaaaagtgagtgattaaatttggctgatgaagcacaaaaaattcaagagctaacgcttgaagaagtcatgggcgaccgctttggccgctattcaaaatacatcattcaagagcgggcgttaccagatattcgcgatgggttaaaacccgttcaacggcgaattttatacgcaatgtccatcgatgggaatacttatgataaagggttccggaagtcagcgaagtctgtcgggaatgtcatggggaatttccatccgcatggggatagttcaatttatgaagcgatggtccggttaagtcaggactggaaattacgtgaaccactgattgaaatgcatgggaataatgggtcaatggatggggatccaccagcagcaatgcggtatactgaggcacgcttaagtaagattgctggtgaaatgctcaaggacatcgataaaaagacggttgatttcgttttaaacttcgatgataccgctgaagaacccactgttttaccagctcggttcccaaacctcttagtgaatggggcaactgggatttcagctgggtacgcgactgaaatcccgccacataatttaggtgaagtgactgatggcttggtctatctattggatcatcccgatgcaacgttagaaaaaatgatgaccttcatcaaaggacctgatttcccaactggtgggatcttacaaggggtcgatgggattaagaaagcctatgaaactggtcgcggtcgagttgtcgtccgggcaaaaaccagcatccaacaattacgcggtaatcgggaacaaatcgtgattagcgaaattccttatgaagtcaacaaggctatgatggtcaagaagattgatgaattacgcgttttaaagaaggtcgatgggattgctgaagtacgagatgaaagtgatcggatgggcttatcagtcgttgttgaattgaaaaagcaagcggatagtcaagggatcttgaattatctgttcaaaaatacggatctgcaaatcacatataactttaatatggtcgccatctcgcatatgcaacctaaacaggttggcttattagaaatcctccatgcctacttggaacatcaagaagaagtcgtgattcggcggacaaaatataccttacaaaaggcattggatcgtcagcacattgtcgcagggctaatcaaggcgctctcgattttagatcaagtgattgcgacgattcgtggtagcaagaataaaaaagacgctaaagataatttagtggcaagctacgccttcacagaagcccaagctgaagcgattgtttcactgcaattataccggttaacgaataccgatgtgactgctttggaacaagaatcagctgaacttgatgcagcgattaaggaataccggatgattcttggtgatccaaaagcacttgcacgggtgattaaggcgcagttaaaagcaatggtcaaaacttatcggagtgaccgaaaaactgaaattgaagcacaaattgagacgcttgaaattgatacaagtgtgactgttgttgacgaaaccgtcatggttgcagttagccatgacggctacttgaaacgtagtagtttgcgctcgtatcaagcatctgaaggggccgacagcggtttgaaagacggcgattttgccattttacaaaagccactacaaaccttagatcaattgatgatgttcaccaattacggacatttaattcaacgaccagttcatgaaattgctgatttgaaatggaaggaaatgggcgaacatatttcgcaatcgattggtttggcggctgatgaagcgattattgcagcatttgcctttaagccaaatgaacaggctggctactttgtgattgggacggatgatggctatattaaacaaactgccttctctgacctcttgccaagtcgaacatatcgttctaaggcacaagactttattaagttgcatgcagatgctcatgtgacaaacgtgaactggattccaagtgatgaagggctagccgtctttagtgctagctataaaggttatggattgagttttaccttatctgaagtctctgtatcaggtgctaaggccagtggggtcaaattaatggatctcaaagatggggatgttgtcatcggctttacgttatatcatccagaagataaacatgcagccgttgccattgtgacgcaacggggcgcctttaaacggatgctcttaagtgaggttggtttaacaagtcgtgcgcgtcgtggggtcttaattctccgtgaattgaagaaagaaccacatcgggtagcagcaatggttagtgttgagcaggcaagcgagttactgattcatactgatcagcaagaagtgattgcaattaacccttatcaacatgcaactgccgaccgttattcgaacggtagttttgtgatggatgttgatgaagttggacaaccggcatttgttcaaacgactattccagttaaaaatgaagacgagtcaaaataataaaaaagcaagtcatctatgtgatgacttgcttttttctgttatacataatatgcggattttttggttttgtactataacagcaaaataagttttgcacaatttaaatggtggggttataaaaatattttaagtagataaatagctataaatcaatctttcaaaagagtttaagagtttctaaacaatcaaaaagaaagggcttgcataaactatgtgatgtgttatactaaaattgtgaaaactgtgataaacaacacttgactaatggaggtaatccacatggtaaaaaccgaaaaaattaacttagccgactattgggacggctttaacaaaggtgactggcaagatgaaattgatattcgtgatttcatccaacaaaactttactgcctatgacggtgatgaaagtttcttagctggtccaaccgaagcaacaacaacgttaaatgatcaactaatggaattgaagaaacaagaacgtgaagcaggtggcgttttagccgcagacaatgataatcctgcaacagttacgtcacacggccctggttatttaaacaaggatcttgaaaagattgttggattacaaactgatgccccattaaaacgcgcattcatgccatttggtgggattcggatggccgaagatgccttggaagcatacggctttaagactgatccagaacaacacaagatttttaacgaataccgcaagacacataatcaaggtgtttttgatgcttatacaccagacatgcgtaaagcacgtcactacaagattattacgggccttccagatgcctatgcacgtggtcggattattcctgacttaccacggattgcagtctatgggattgatcgtttagctgaagaaaaagtccgtgactttaatggtgttggcgacggtgaaatgacagacgatgtcattcgtcttcgtgaagaaatcaatgaacaatatcgtgctttacaagatatgaagaaaatggctgctagctatggctttgatatttcaagacctgctaagaatgcccaagaagcaattcaatggatttacttcggttacttagccgctattaagacacaaaacggggctgcgatgtcagttggccggattgatacaacgatggatatctttatccaacgtgatttagagcggggcttaattacagaagctgaagcgcaagaaatggttgaccattttgtcatgaagttacggatggttcgtttcattcggacagaagattataattcattattctcaggtgatccaatctgggcaacattatcaatgtgtgggattggtatggatggtcgtcatcatgtcactaagactgccttccgtatcttgaagacattggaaaatatgggtgctgctccagaacctaatatcaccttactttggtcagatcgcttaccagaaggtttcaagcgctatgcaacagaagtttcaattaagagttcaacgattcaatacgaaaacgatgatttgatgcgtaatgaatgggggagtgactattatgggattgcatgctgtgtttctgcacaaccaattgcagacggcgttcaatattttggcgcgcgtgctaacttggctaagacaatcctttacgcaattaacggcgggatcgatgaattaggcaaagctcaagtcggcccagcttatcaaccaattacaagtgaaatcattgattacaaagaattcatgggtaaatacgataagatgttagattggttagcagacgtttacgttaatgctttaaacaccatccactacatgcatgataagtattactatgaatcagcacaattggcattgaagaatagtcgtttagaccggacatttgcgactggtatttctggtctatcacatgcggttgattcaatctcagcgattaaatacggccaagttaaagttatccgtgatgaagacggtatggcagtcgatttcgaagcgcaaaacccagactatccacgttatgggaacaatgacgaccgcgctgacgatatcgctaaatggttagtgaagactttctatacgaagatgaatacgcatcatttatatcgtggctcaaaattatcaacatctgttttaacaatcacatcaaatgttgtgtatggtaagaatactgggacaacaccaaatggtcgtcaagctggcgaaccattctcaccaggtgctaacccagcatacggtgctgaaaagaacggtgctttagcatcattactttcaactgcgaagattccataccgttatgcaactgatgggatttcaaatacgtttggtgtcacaccaaatacattagggcatgatgatgaagcacgtaaagacgcgcttgtgaacatggtcgatggttacatgattaatcaagggatgcatttaaatatcaacgtcttcaataagcaaaccttaatggatgcacaacaacatccagaagaatacccaacattaacggttcgggtttcaggttattgtgtctacttcgctgatttaacgaaggaacaacaagacgacgttatctcaagaacgttctttgacgaaatgtaatctaacgaaagtggatagcaatatccgctttctggtaaggtcgttaacgcgaattaacgactttaccagaaagcatagcttttcttttaagaggtgaaagtgaaatggcaattaaatttacaacacggttatcaactgaaaatgttgttccagaaaccccgataacaccagaggtgccaattggatatgttcattcgattgaaacatttggttcagtggatggtcccggaattcggtttgtcgcctttttacaaggctgtcgcatgcgttgcgaattctgtcataatccagatacgtggaatattggtagcggagaagcttataccgcagacgaattaatcgcaaaggcactgccatataaggccttctggggtaaagatggcggaattacctgtagcggtggtgaatccttaattcaaattgattttttaattgatttatttaaaaagtgtaaggcacaagggattaatacctgtttggatacttgtgggcagccgtttacgtataaagaacccttctttagtaaattcaaagaattgatgaaatataccgatctttcaatggtcgatattaagcatattgatccagcggggcacaaaaagttaaccggcttttctaacgaacatattttggaaatgattgaatatatgtcaaatcatggtcatcatatgtggattcggcacgtcttgattccagaacggacggattacgatgagtatctcactcgtctaggggattatattcaaacgttaaacaatgttgaccgagtcgaagtgttgccctaccatacgatgggaatcgtgaaatacgaaaagatggggattaaatatccgttagcggggattgaaccaccgacccacgatcgcgttgtcaatgcggagcgtctattgcatacagcagactatccaaagcagcaacgctaacataagaaaattttaagcctttaataagaatgagcaacgaaaggggttgctctttttttatatctttattattataatgataggcgtaaactaaagaacggagatttgaaaatgaaaacaagacaagaaaatatcttctcctctaaaacattaacctatttcctacagttagcggaaacgatgaattatacccaagcggcacaactactcggtatcacgcaacctgctttaacccaacagattaaaaaattagaacggatagtcggcgcgcctttattttattcagtcggcaagaagttacatatttcggatgctggtcggacgatgttggatgctacccatcagattcatgatttattaaatactgcgacggatgaaattcaaagttcaacgagtgcgacgcgcggtaagattaatattgggattttagcatcgatggaaatcagtgttatccaatccttcttaattcaatactataaacaatttcctgacatcgaagtcagcatgcacttattgactcggaaagaaatctgggaccgacttgaaaataataaaattgatattgccattatgtatttgccagatgacagcattaagaactggaaaccttataagtcacataagattgtggatgaacgcttactctttatcagccaagatcctgctttaaagacgcgtaagaagatccgttttaaagatacattagataataaatgggtgacatacccagatgaatactatttaaatcaattcatcagtgaagcctataagaatcaattggttgatcgtccagtgagtgcggctcaattcacatcaccatttgaaatcatgcgttttgctgaagcaactgaattaagtacagctttaccaaagagtttttatgaagcacataatttgggacttaagggaaacgcggttcaatttgatccggccattcagttcgaattagcttttgtcttccgcaaggaaaaggaagatattccacggattaatagctttttccgtgaattcgaccattatttagaagaaaaagattatttaacacggattagagagcaaaaccgtagaatcgtctaatatttttggtataattaggatgttatttttttaaaaggaaggtctgtataaatatgagtaaagaattagtattcggtcaccaaaacccagatacagacgcaattgttgcggcaatggcgtttgcttatcttcaacaacaactaggaaacgacgtagaagccgttgcgctaggtgaacctaatgaagaaacaagctatgcattgcgtcattttgcagcagcaacccctcgcatcattaaagaagcaagcagtgaagttgacagtgtgatgttggttgatcataacgaaagccaacaaagtgttgccgatatcaaagatttaacagtgacgcacgttgttgatcatcatcgaattgcaaacttcgaaacagtcagcccattattctaccgcgctgaaccagttggctgtaccagcacaattttattatcaatgttcaacgaaaacaaagttgaaattccagctcaattagctggtttaatgatgagtgctatcatttcagatacgttgttgatgaaatcacctacaacaactgaaaaagatcggattgcgattaagacattggctgaaattgctgatattgatttcgaatcatatggtcttgaaatgttaaaagcgggcactaacttagatgataagagcgaagctgaattaattgaagcggatgctaaaacattcgatatggctggtaaaaaagtgcgtatcgatcaagtgaatacagttgatatcgaagcggtcttcaaacgccaagctgcttttgaagctgctatcgaagcagacaacaaagctaatggttacgacttattcgtacttttgattactgacatcttaaacagtaactcagaagcgcttgttatcggtgaaccagcagaagcctttgaaaaagctttcaacgtaaaattgaacaaccatcgtgcacaattagccggtgttgtttcacgtaagaaacaagtggttccacaattaacagaagcattttaataacgattaataataaagtccttcggggctttatttttttattaggaggataggtaaatgaccgaggaaagcattgatgcaattcaagtgattgaagcgaccattcgaaattgccaaaagagtcagctgaagtttgtagcgggttcggctcaatttactttattaaaaaataggctttacgcattagaagttggtcgtgatttattgaacgggcacacagacataacagtcgaacccttagtcgaggcacaagccccgattgaatcgattattcataaaactgaaaaagcactctctaatcaaaaaaaaacatcacccgtgataaaacgaatgactctattattagcagcgatgactgccgtgcagactgctattataaaccaactatctgcaaaaaagacccctcattaatttgggggcttttttgtgtgccaccagattggaattattctaatctaactaaaaatgtgttataatgtaaatgaattcataagaaggagcgattgacgatgaaacataccatcaagtttgccttaacaattagtgtgggtgtgattgcgctatgcttggcgtttttgctacatgagccattgtgggcacagattttagtgagtttagcggggagcttagtagcgctctcgatgtttattgagatgattaaaacgctaaaatctggtcaatacggggtggatctattagcgattaccgctattattgcgacgttagcggtcggtgaatattgggcagcattaatggtcttggtcatgttaactggtggcgactcattggaagactatgcagcgcataaagcaggccgtgagttaaagacattacttgataattctccgcaaacagcgcatcgccttgttaatgatgcggtcgaagatgtttcagtcgataagcttcaagttggtgatcaagtgattattaaacctggcgaattggtccctgttgatgggcatattattgcaggaagtgctttattcgatgaatcatcgttaacgggtgaatcacgccccgttgaaaaagcactaaatgatgagctcatgtcaggctctgtgaacggcgatacgtcggttaccatgcaagttgaccaattagccgttaatagccaatatcaagcaattgtacggcttgtagagacctctgcggcacaaccagcgcattttgtgcgcttagctgatcgatatgccgtgccatttacattagttgcgtatgtgattgctggagtagcttggtggttatctaaggatccagtacggtttgcagaagtgcttgtcgtggcttcgccgtgcccattaatattggcagcgcctatcgcgttaatctcagggatgagtcgtgctagtcgaaacgggattattgtcaaggctggcacaacaattgaaaaattagcgtctgctaaatcagcagcgtttgataaaactggaacaattacgaatggtcaattgacggttgaccaagttgtgccagtgattggtatcgcaccaaccgatttattgcaattggcggctagtgcggagcaagaatcttcgcatattttagcacggtcacttgttaaagcggcacaggtagaacaattacaaccaattgaaacattaaaagaagcaacgggcgctggggtagttgcgacgctgtcgtctggacaaacggttcgtgttgggaaacatcaattcgtgacgccagatgcgcaacagcctctgcaagaacaaaccactgtttacgttgcgatcaatgatcaatatgcggggtacattacgtttatcgatcatttacgaccagaagcaccggccacgatgcagacgctccatcaactggggattacgcgtttgatgatgttgacaggcgatcaagcgacaactgcgcaccagattgcggaacaagtcggaattgatgacgtccatgcaggctgtctgccagtcgataagattcatttaattgaacaagtaccgcaagaccaacgcccactaattatggttggtgatggggtcaacgatgcaccgtcactggcaagtgctgatgtcgggattgcgatgggggcccatggcgcaacagccgcaagtgaatcagcggatgtggtgattctaaaagatgatttaggacgggttagtcgtgccgttcaaatcgcgcgtgacacgatgcgcgttgctcgccaggcggttttgattgggattgcaatctgtattgggttaatgttgattgccagcaccgggattgttccagcattagtgggggctttattccaagaggttgtcgatacagtttcaatcttatatgcattacgagctagaacggatcgttaagggaattaaaaagagccgtattaacaccattcaagtgttaatacggctctttttttgtttatttttcagattgtacgtgtaaaaccatgtcttttggtaaatataacttaggcaccatggctaaacaaatacatagaacgatgccggttagaatgaagctagcgataaagctgccaccgttaacagtgagcgagtatagccaagcattcatacctttgggagcgtatgagccccaataaacggcaccggctaagaagtggcagaagtattttgcaaaagtaccaaaaaatgcggccatccataaaagggtcatcgttttgacttttgtatgattttgaatacttgcttgaataggtcgttgtaagatacctgctaaaccaacaaccatgaaggcaatggtaaattctagcaatccttgccatacgttcaagacactaccgtttcctaatccacgtaagattaagtctagtagaccccagattaagccggagaccattccaggaatggcaccacggcgtaaactgtagattacaatagggataatcccaaaggagacttcgattgcggaaggccccactgtatgggggatgtattccaatgccacggcaaatgccgcgatgattgccccttcaatctgaatcaatagacgctgatgttgcataaaaataaccccttttcttgttcaaccaacacaaaaaaggagttatcatttcaactccatcacaattcctacgcttgtcttaacaaacaggttcgaagggtctgattaaaatcactctcagccaatggctcccctttgcgatggttaacatttaatttttaggaacgctttcagtatactcgatagctggtataagtcaagcaatgtgtaaatcgacgaattgatgtaaaccaaatgactgttagaacgacattgataatcgttgccaagaagagcactaatagtggctattcaagctggtccattgccgagcgttgttcatcagcaacgacgtgcgtatataagtgagtagcttgcgtggtcgtttggcctagttgggtcgcaacaattgtttcactatgagttgccgccatgagatcagtggcaagtgtatggcggaacttgtgtggtgtgagacgcacgccaaatgcttcagaatacttcgcgactaacttttcaatggcatagttgctcatacgcttggcgctgccacgatagcgactgacaaataaggcttgttcattatcttcttttagatagcgtgatttacgaatctggcagtaatcccttaaaaaaggtaaactccacggagcaattgggacagtatcttgctgtccgcctttacggatcacggtaattgtaagttgttcaagattcaaatcgttgatgttggcttgggccaactctgatagtcggatgcccgttgccagcgccagtacacagatggcaatatcgcgttcgcaattttgcttgtatgatgccagttggcgattagaaagcaagttagggtaatcaacttgcatgaaggtgatgaagtcgtgtttcttttcaccggtcagcagttgtttgctgatgtgtcgtgaacgtgtcgccattgtttctgaagctttaagtagtttcaccttcttcatgacgtttcggtaaaaataaggctcaccatcagcttgttcggcttcaatggttaagaagtaccagagcgcatttaatgcgttaatcgagcggttaacggcttgaaaggagagcttatggttattttgtttacgcttattcattagaaaaatcttgtagagctcaatatcttcgagtttcattttttcgagtgcggtcagtggcatctggtcgatagaggggaccgcgacgatctgttcatcaactaaccaggtgaaaaagcgaacgtattcttgtaagtattgatagagcgttgcagaagagtaggcgtttgcctggcggttaatgtagaatttacgaatgtaatccggaagattggcgagttgcttttcgcagagttctaagtaacgttgttgatccatgatggaagactccttaattatcagtttaaagatagtttagcaaaaatgaggtgagaatactacaagtgttgttaaaaccataattttaacaacacttgtattgcaaaccgttccgcaaactgatgatcagatggtcttattcgactatctgcatagcaacctaaagatccttattccgtttaaaagctggtatatcaacgtttaaggccttttttaacgatttgatatgtgagttttaaggctaagatgtgttaatatgcgtatttaccaattaaaatctggcataatcgtcagattaatcacggatttgtgcctgagcttagatgaattctgcatttaaagttaagtttggcgatatcggttggccagtcagtttgattcatcatattggcgttgagtaacttgtaatagtttatgaatcgtgcagtgtaaaaaacaaacgcattaagtgcggttcatcaaatcaattgaatgatgttggataataagtggttattttagcgctcttttaagggataagcatttcttcgcataatatatattatgtaaactaaaatagatttaaaaaattaactaagcctacccactcgtcaccagcgtttaagcgcagcaaaaaagcgccatattaaaatgacgcttctgtaattagtgatttaaaaactgagccaacaaagctgcaaagtcatttggattttggaataacgccatatgaccagcatctgggtaaagttttaattgggaatttaaaatccgttcatgtaattcatatgaaccattaacaggtaccattcgatcgtgatcgccgttgacaatcaatgttggttggttaatttgtgccaggtttgccggttgatcgtgcgcatactgtttaattgctattaattgacgacgataagtggctaacgtaatggctttatcttcaacaatttcacgctgttttaaccggttaatgaacgctttaccagcctgtttaccttggggcgttctggtgaagaagaggtattccttaacgtctctatgcgttaagaaggaccgaattaagtcaaaagttgttatgcgccccactttggcgatttctgagtcaccctggggacctgttccgactaaaattaagtgattaacgcttgaggggtattttaaagtgaaggcctgtgcaataaaaccacccatcgataatccaagtaaatcgaattgagtgagctgcatagctgttataaaagcataacaatcagctaccatttgctcaatcatcgtggggactttgccatccgagaaaccaacaccacgattattaaagacaatcacgcgtcgttgctgactgatcaggtcaattaatgcagggtcccagttatctaaagtggctgataagtgattcaataaaacaagtggtaagccgcgaccggtacccacttcgcggtaagcaaaccgttggccttgttgatcttgaataaattggttgggggttgttagataagtcatcttgattagcccgcttgaaccttaatcaccactttaccagttggatggccgtgagcaacaagttctagtgcctctttaacgtgtgctaaatcgaattgatgcggatcgatggctggtacaatcgcttgttgttcaacaatttcagtgatttttttgagttgggcaccatctgaacgaacgaaaataaagcgatattcaacgcccgcttttttagcgaggcgatcccatttccgcccggccaacgagaataagagttgcttccaaaatggtaattgcaattgtttagcgaattgtttgtttggaccggcaatcaagcttaaaatccgcccgcccggcttcataatcgccatttcacgttcaatatctgctccaccgcgtgtatcaatcacgtaatcgatttgatctaaaacttcccagtaatcggttgttttgtaatcgatatattggtcagcacccaaattcaaaatgtgatctcgcgcggctgcattgcctgaaacaatcacggttaagcctagtgattttgcgattgggacggctattggaccgaaaccgcctgaaccaccagggataaacagcgttcggttcggttgggctgccaattcctcaaatagcccctgataagccgttaagccagtcagtgggattgcaacggcttcacgtagcgataaatcctttggcgtgtaccagattgcatcggtggtaaccgcgacatattcagcaaagccaccgattttagccaatggtaaacgcgcatagacttgatccccgactttgaaatcagtgacgtctgttccaatcgctgtgatttcaccggcaatttcattgcctaaagtcagtggtaaagcatagttttgcattaatttagtatcgccgcggatattcattggatccaatggattcaccgctgcataggcgactttgacgagtacttcattggctagcggttgtgggcgatcaatttcttgaatcgtgacagctagtgtttgattatattttttaatttgagctgctttcatattagaaaacctctttccacgggagtgtttgtagggtttgttgcacaattgctgttagcgtagttgaatctgggttcactttagccatgacccggataccaatgagcgcactttgaagcgatgcagctaaaagatcaattgcaacagacggttctagttcggcctggccggcaatcagtaatgcctgcaacagtgctttttcttgggttaaataatgctgaatcagcgtttggatgtctggttctaatgaatttaacgttgccgcggtattcaccactaagcagccggctggttggttatccggatggtcaataaatatttcaaaaatggctgttaagcgcgaccttaaatcggtatgtgttgccagtacttgctcgaaacgctcgttaatttggtcacgataatgtgctagtacttggataaacagttcatgtttatcgccgaatgtatcgtaaatactgcgccggtgaatccccattgcatcaactaggttttgcattgaggtattctcatagccttgttgccaaaagacaagcatggctttgtctaagacaaccggtgcttcaaatgtttttgtccgcatctggatgctcctctcttattagaacgttcattctaatataaacgattctttgaaataacgcaactagattttgcgcaattttaaggggcaataaaaaagaacgcctcgaatgagacgttcttgtcagctgttattttgtccgatagaaaataccaaacgcccctaggccaacgtgactcataatgaccgggctggttagtgcgactgtataaggcacatggggctgtgtttcttcaagcgttgcttggatcttagcggatagttcatccgtgattccgacgtgtgagatgccgatttccgcaacgtcttgggtggctaagtattcacggatattgttgatttcttttgtaaaagcttttagtccccgcccctttgcgacgacttctaattccgtatctgttaagcgcacaattaccttgagtttaatgattttcgttaatagcccggccattctactaattcgaccaccgcgttgaagcgcgtcaagtgaatctaaaaagacgtaggtttcggttttacgacggatgtcatcgagatgcgcgataatatcatcaagaggcttccctgcttcaacgtcttgggcggcagcaaccacttgataagcaagtccacggtcgattgctttactatcaatcacgtgtacgtcacttgttgattggtgggctgctgtgtgtgccccttcgattgtgccacttaacaagccggtacaatgaatcgatagaatcgtactaccatcagcccctaattgatcatataaatcgacgaaactgccgacagttggctgacttgttgttggaaaatcggtcgttgcattttgtaagcgacttaaaaattcagcgcgggtaatggtttgtccatcaatgaaagactcatttccttgttgaatcgttaaggggacgatgtgaatgtcatatttggcgcgttcgtctgctgtcagttgaatcgatgagtccgttacaattttaattgtcatatgagttgtactccttcaagttaaatgttgaggtaaattgaaaaaaacatcagggtcgttccgagcattacgaaaaagtgccaaatcaaatgtaagccaggaattttaggaaaactataaattagagcgccaacggtaaagactacgccaccactgactaacagccaaaaaccaactggactgaggttgacataaagggtcttaccagctaataaacataaccaccccatcacaacgtaaatcgttgtttcaatcttttggtaccgaccgtggctcaaaatgtgcgttataataccggcaatcgctagtgtccagattgcaatcagtaagctaattcctgttgcatggccaataaaaatcaaacaatatggcgtgtaggtaccagcaatcagcaagaaaatattgctatggtcgaatatttgaaacacgcgcttggccttggtaaatgctaagcagtgaaataaagtcgaagcgagatacagtagcagtaatgtggcgccatacactgctagactagcaatcgcgactggtgagagtgttttatgaatgcttttgaccaggagcatgatgactaacgttaaactaccgaaaaaaccaatcccgtgggtaatggcattccatatttcataaatcagttgttgtcgtttaatcgtggaaagttgcatggttctcgcctctttttctctatttgccgagtattatagcgcgaatgtagattataagtcaatagataatagaattcgattctatgttagtgacaaatgataattgctatggcataataaatatactatcaacagattggtggcgttaatcagtatgcaatcacaagaatttgaaaaatggttgggtgactttcaacaattgcggttaccattatggtctgaatttccagatttagacctctatatggaccaagtcattagtgaggtcaataaacgactgagtcctttgttggacgttaaaataacgaaaacaatgattaatagctatgtcaaaatggcgattattgaacgaccggaaaagaaacgctataatcgggatcatttagccgaattgattgtggtcagtattatgaaattagtcttcccgctcgatgtcattaaacaagggatttcgcaatcgttggcaaacgacaccgctggtaaggcatatgatcagtttgtgcggttatttaatgccgaaattgcgaatattaacgcgcaatcaacggttaatgaattcaatttaaacgaggaaccgctcaacattgttcaaaaagtagccgttaaatccgttatttataagctaattgggacgaagttggttaccttagaagaacccatttctatcttataagtcacaaaaaaagcctgtcgaattgttcgacaggcttttaaattaggctttatcaaaatctttaatccaagcaagtgcaatggctttttcaccaagatgggtcccgataactgggccaaagtagctgatatcaattggtaagtctggatagtttgcttgaagcttatcacgccatgcaatcgctgctggttcatcgttagcgtgaatgattagtgcgcgtaatggatagtcaacacgttcggctgtttcagcaaaaatttgttcagcgcgggcgtaagccttcttcaatgaacgaaccttctcaaatgccgtaattttgttagtgtcagcgtcaaacgttaaaagcggtttaatcttcaacatgctaccaataaaagcagatgcgtttgataaacgaccaccacgcactaagttttgtaagtcgttaacaatgaaacattcatccattgtgctttttagatcgtcaaggcgtgcgataatctggtcgacggtcacttctgggtcgcgtgccattctggccgcttccattgctaagtagcccattaacatcacagtaatccctgaatcgtatgggacaacctggatgttatcgatggtgcttgccgcatttttcaatgtcgtgacaaacccagagatggtactagcaaggtggatgctgatgacagcatcatacccttcgttgccgaggtcttcgtatagttttaacatttcacccagtggtggttgtgatgtactggggaatgtttcggatgtttttaatttttgatagaactcttcagtggttatatcaacgccttcatcatagacctggccatcaaggataaccggaataggtacgacgaagagatgatggtctttcacttgctgttctgtgagataagcggtactatcagtgactacagcaattttcatggtgacacctacttttttattattcggtaataactatatcataaatggtaggttaattcccctaaaaatgccgattttccgaaaaatgtatagggcgtctcattttaatggtcgattaaagctttgataataacggttcagtaggatttttaaaagttgctgttcatcggtactccagttttgttgaatgtgattttcaagttcagtttgaagttgttgcaacgtacttaatgccgttttggcggtcggtgttaatgcgtaaacgcgttggcgcggatcagccccggtcacttttgttaacagcccttcttgagccatcgtatttaactgccgactgagtgtcgatgcatcgagtttggttaacgtagttaattctgcgtgcgaaatgcgttcttgatcgggttcaatggccattagaatattgacttgggctaacttcaagtcgagtcgtagcgcccagtgtttcttttgttcttgatacaatagattcagttgattaaacgttgctaaggttgagcgcacggtaaatccccctttaattgtataaagcaatttgataattgtattatacaatagtcgtgttagcgattgcaaacaactaatttctttgaggttccactgcaaaaccgttacaataagtaagacaattcaattatagagagtgtgagcaataatgacctttgatggtttaatgacccacgccgttgtaaatgagctaaatacaactttagcagacggcaaaattacgaaaattcaacaaccttatccaaacgaagtaatcttaacgattcgggcaaatcgtaagacctatccccttctcctatcagcccacccatcttatgcgcgagtgcaagtgacgcgggtgccttatgcaaaccccgcaacgccaccgaacttcgcgatgtctttacggaagtatttagatggcgccattttagaaaacatcaagcaaattgaaagtgatcggattctaagattcacatttaaatcacggaatgaactgggggacttacaacaactatgcttaatcgttgaattgatgggccgccatagtaatgtgattttgattaatcaagcgaccaataagattctcgatttaatccggcacgtcggtgtttcgcaaaaccgttatcggttcttaatgcctggtgccgattatgttagtccaccggctgcaaccggggttgatggttttacgactgatttaaagacgcttgattggttaagttattataacgaagctgctgatgaacaagtcaaatggttacaacaacacttccaagggatgagtcgtgaaagtgccgttgaactacaaacccgtttaatggatcatgacaattatttggcggttgtgactgatttcttcaagcaattcgaccaagtgacaccaacgttaacagttggtgaaaagaagtcgtggttcacggccttcccatatgagagcctgacagggacactgagccattttgacacgttgagtgagctgttagaccaatattacttacacaaggcgcagcgtgaccgagtgcagcaacaaggtggtgcgctcatccacttcatccgcaacgagattcaaaaggatgaaaagaaactgaaaaaactacaaaaaacgttaaaagcagccgacagtgctgatgattaccggattaagggtgaaattttgaccacctatttgcgggaagtcgaacgtggcatgactgaagtcacgttgcccaatttctacgacaataacgaaccgcttaagattaccttgtcgaaccagattagcccttcaaaaaatgcgcagaagtatttctcgaaatatcagaagctccggaattcaattgcctacgtcaatgaacaaatggcaaagaccgaagcagaacttgcctacttcaacacgattatggcgcaaattgaaattgctgaacccaaagatttagaggatatcaaagctgaattacaggctgaaggttatttaaaggctaagaaaaccggtgccaagaagcagaaacgttacaagattagtgaacctgaagttttctatgcgagtgatggtacccggattttcgttggtaagaataactatcaaaatgatcaattaaccttgaaaaaagcccataaaactgatatctggttgcatgtgaagaacattcccgggtctcatgtgattattgatagcccagatccatcagaagatacgcttcaagaagccggcaacttagcggcctacttctcgaaggcgcgcttatcagcggccgtgccagttgattatattcaggttaagaagattaaaaaaccgaacggtgcgcgaccagggtttgtgatttacgaagggcaacaaacactttatacgacaccagacgagcaactcgttcaaaagctacgtaacaaacctgtgcaagactaataaaaagcgttactccaaagtgaattggggtaacgcttctttgattggtgcggctgatggcacacgctaaacgtgttctgcaagccattactttccggttaacactctattctaatgggcgtctgaccatgcttgtgggtcttggcgccattcattgagtgatgtggcttgttctggagttaagttatcagcggcttcttcgaccgctaataaggcggagaaattcgataaggtcgttagtggtaagttagcagttgcgaaattctgttggccggctgctagttcgtatgaaaagatgccaaaaataccaaggacttctgcgccctctttttgagcggcggccgctgcttgtaagacactcccgccggttgaaattaaatcgtcaatgaggactaatttttgaccggctttaaacggtccttcgatttgacggccttgaccgtgatctttcggtttcgaccgaatgtaaaccatcggtaagtcgagttcggctgcgacccatgcagcatggggaatccccgcggttgctgttccgccgatgacttcaacgtctgggaattgcgctttgattgccgcagctaagttgctggcaatgagcttgcggacttttggataaccaatcgttaaacggttatcgcaatagatgggacttcttagcccactcgcccaagtaaaagggttgttaggactgagactgacggcatgaatatcgattaaggcttgtgcgacttggtgtgcaattgttgtcatttgaaagactcccattctgatttgatagcttggtaagcttgatatggatttgtagcttgcgtaattgggcgcccaacgacaatcgccgagctctcagcttgtgcggcttcgtgtggtgttacagcccgtttttgatcattggtttggcttgttgctggccgaatcccaggtgtgacgcagagaaaatcagcattggtgtgttcgcgaatcgttggcacctcttgagcagaacagaccacgccatcgcaatccgagttctgtgcgagttgcgcatagtgtgcgacagattctggtaggctgacattaacgagttgttcggtttgcatttgcgcttcgctggtcgacgtaagctgcgtaatcgctagtagtttagcgggccgcacgttgccaagtgtggcgccttttttcagaccagccgcccctgctttgagcattgcctgcccaccagctgcgtgaatcgttgtgtaatcgacaccgagttggccgataacagtcatcgcgctttgaacggtgtttggaatgtcatagagttttaggtcgagaaaaatccgatagccgcgcgcttttaacgttttaatcagctgtggtccctcttggtaaaaaagttccatgccgactttaacgaataaggattcatcagttggaaattgcactaaaaaacgatctgttgtttcccagtttggaaagtcgagcgcgataattaaagggttagtcatgagtgccctcctgtggtagaccgaatgattttaaatcggttagttgatatttagcgagttcatctggtaatgcggcgattagttttggacaggcaaatggatcgctgaaattagcagtgccgactgcgatggcattggcgccggcggccattaattcaagtgcatccgcagctgttgagacaccgcccattccaataatcggtaatttcgaaattgaacggacttgatgaatgagccggatggcaacgggttttatcgctggtccagataagccgcctgtttgattagcgagaattggttggcgtgtttttggatcaatccgcatccccaccagtgtattgattaatgagaagccggctgctcccgctgcttcaactgcttgcgcaatcggacgaatatccgtcacgtttggtgagagcttcacgtaaaccggcacttggctgactgcaacacaggccttcgtcaacgtggcagcggcttctggtgatgtgccaaattcaagaccgccatgggccacgtttgggcacgagatattcagttcgatggcatggacgttgggcgcttggctgatttgttcacagacagcgacgtaatcagcttcggtattgccggcgacattggagatgattggtaactcgggataatgctcggctaaccagggtaatttttcttgcataatgacttcaatcccgggattttgtaagccaatcgcgttcaacatcccacttggggtttcagcaacccgtggtgtcgcattgccaagtcggggttctttcgttgccgctttgataataattgcgccaagttcgttgaggtcataatagcgaccgtattcctgaccgaagccaaaacacccggaggcgggcataatcggattttttaaagctaagcctggtaaagttactgctaagtctgtcattaaatgagcacctcgtttgttttgaagacgggtccgtcatcgcaaattttgagctgaatgcttggatcacgtttgagtttggtgacacaggcgtagcaggcaccaatcccacaagccatccgttcttccaatgagatataggcattgggatgctcactgaatcgattatcgacggccattaacaagccttttggtccgcatgcgtaaatggcatcatatcgggttgtcgcatcagcaaactgtgcatcgagtaataaaccaacatggccttggtagccgtacgagccatcatttgtcgcataagcgactggcccgagcttgcgaaagtgatcttcatagaaaatggctgctttagttgcaaagccgaacacgtgttgaacgtgaacgccttttgcattaagttgccgtgagagttcatgtaatggtggaatcccagtcccgccaccaatgattagcgcgttttgtccggctactaattggtcaattggataaccgttaccaagaggccctaagacggacaagcttgtgcccaccggtgattcacttaagatcgtggtgccttcaccaacaacgcggtataacaaggtaatcgtgttagtttggcggtcgacattggcaatcccaaatggccgacgtaataaaagggcgtcactggggattttgatatcgacaaattgtcccggtgcaatgggttgctgtgcgaggtctccggtgaggcataattcatagatactgggggcaatttcggtttgcttagtgagggttaattggtattctaatggcaacatttagcagcctccttctgatttctatgtaataaaagagccttaggcaaagggcttcagactcttttagtggttttaaagtggtttggtcaggagcgattgagattctaggaccgctaagatcgcatcagcggtatccaatgaggtcatcaatggaatgccgtgttcaatggcggtttggcgaatgacgatgctgtctttagcgacttgtggggcttcgttcaagccggttgtgttgatgaccagttgaatgtggccggctttgattttatcaagtaaatcgccgctcgtagcattaatcttggcaacggattgcactggcacacctgctgcttggaattcttgactagtcccaggcgtggcaatgatttgatagccaacttcgcggaagcgttttgctaattcgagcgcttgtgtcttatcttggttagtaattgtcattaagacgttcccgtgacttggtaagtgcatcccactagcttcgaacgctttatagagtgctttttgcatcgttacgtcagttcccatgacttccccggtcgatttcatttctggcccgagtaagctatcaacccgcgtgagtttcgagaatgagaagacaggtgctttaatatgaattagtgggcccgctggtaatagaccggttgggctctttaattcagctagtgtgctgcctaaaatgacttgggtggccagttgcgccatcgagatgccggtgactttactcaagaatggaacggtccgactagcccgtggattgacttcaatcacgtagactgcttcattttggataatgaattggatgtttaacaagccgcgacattcaagtgctaaacagagcttggtcgtgtaagtgatgatggcttgtttttccgcatccgtcagattttgtggtggataaaccgccattgaatcgcccgaatgaacaccagcgcgttcgatatgttccataattcccggaattaagacatctttgccgtcacagatggcatcgacttcgcattctttgcccattaagtagcggtcaattaggaccggttggtcgactgaaactttaacggcctctttcatgtaatgtgtaaggtcttctgcagtatgaacgatttccattgcccgcccgcctaaaacgaaactaggtcggattaagaccggataaccaatctcttcagcaatcttcaacgcatctggcgtattggttgcggttgccccgactggttgtggaatgtcgagttcggcgattaattgatcgaattggtcacggtcttcagcgcggtttaagttcgcgacgcttgtcccgagaatctgcacaccattttcggtcagtggttcggcaaggttgatggctgtttgccccccgaattgcacaatcaccccttctggtttttcgagttcaacgacgttgaggacatcttctagtgtcagtggttcgaagtacaatttatctgaaattgaaaagtcagtcgaaactgtttctggattactgttcatgataattgcttcgtagcccgccttttggatggcttgcacacagtggacggttgcataatcgaattcaaccccctgcccaatccgaattggaccggaaccaatcactaagattgaaggctttgtgctgacaatgctttcgttttcttgttcgtaagtcgcgtagtaataaggtgtttgtgattcgaattcggctgcacaagtatcgaccatcttataaactggctgaatgccactttcttggcgcatttggcggacttgggcaggcatgatttgccaagttgcggcaattttagcgtcggcaaagccatttttcttggcgagttcgagtaattctaagtcacctttatcggtccggagttgttcttcaatttcaacaatgtggctgagtttatccaggaagaaaagatcaatttttgtcaattcactaagttcttgaattgaataaccgcggcgcaatgcttcggcaaggtagaaaagtcggtcgtcttggggatgtacaatccgttggacaaggtcgttatcaccgactgccgtcaatgctggaatttcgagatggtcagtgccaatttcaagtgagcgaacggctttgagtaatgcttcttcaatgttgcgtccaatggccatcacttcaccggtggccttcatttgggtgccgagttgccgatcacctttgttgaatttatcaaatggccaacggggaatcttcgcaacgacgtaatcgagcatcggttcaaattgcgcataggttgtcccggtgattggattatgaatttcatcaagtgttaaaccgatggcgattttagccgccatttttgcaattggatagccagttgctttagaagcaagggctgatgaacgactcacccgtggattgacttcgataatgtagtagcggtcgctattaggatcaagggcgagttgaacgttacagcccccttcaatcttcaaggcgcgaatgattttaagtgcggcatcgcgcaatgcttggacttcacggtcacttaaggtttgaacgggtgcaaatacgatggaatcgccagtatgaatcccgactgggtcgaagttttccatgttgcagacgactagcgcgttgtcatttttgtcgcgcatgacttcgaattcgatttccttgaaaccggcaatactttgttcaacgaggacttgtccgactggagataggctaagcccgtttttgacaattgtgctcagttcaccggcattttcggcaatcccgccaccagtgccaccaagggtaaaggctggacggataatgaccggatacccgttttcgttaacgaatgtttgggcttcaacgagtgaatgggcaatcgcagattctggaatcggttcgtttaactgattcatcaagtttttaaacagttcgcggtcttcagcttgatcaatcgcgctgagcttggtaccgagcaattcaatgttcagctcagcgagaatcccgttgtttgccagttccaaagccatatttaagccggtttggccgccgagggttggtaagatggcatctgggagttctttgcgtagaatttgcgtgacaaagtcaatcgtgatcggttcgatataaaccgtatcagcaacggctttatcagtcatgattgtcgcaggatttgagttaattaaaacgacttggtagccttcttctttaagcgctaagcaggcttgagtgcctgagtaatcaaactcggcggcttgaccaattacgattgggccagagccaatcactaaaattttatgaatatcggtacgttttggcatcactaaatcccctttttactatttttggcggcgattgaagtcatcgatcatgtcgataaattcatcgaatagatgtgcagcgtcgtgtggaccaggggctgcgtctggatggaattgaacggaaaaggccggatattgtctatgacggagaccttcgactgtttgatcgttaatttcaacgtgtgtaatcagaaggttttgtgggtcgatggagtcggcatccacggcgtacccatgattttgagatgtgaagtcgatccgtttggtggcaacttctcggaccggatggttgaaaccacggtggccgaacttcatcttgtaggttttagccccattggcgagggcaaaaagttggtgaccgagacaaatcccgaaaatcggcactttaccttgaatccctttgatcatttcaatggcttctggcacatcttctggatcaccagggccgttggttaacatgacgccgtctggatcgagactcagaatttcttcagctgttgtgttgtatggtaagacagtgatgttacagtcgcgttttgacagttcacgaaggatactatgttttaagccaaagtcaatcacgacgatgttccgcccgttagcaggactcggataaggtttggccgttgagacttgttggacttggttttttggtaagaccaatgccttgagttgatcgaacgcgtgatcgtctgcggcatcaacgatgctggctttcatggtccctttatcgcgcagacggcgagtgagtgcccgcgtatcgatgccggcaatcccaggaattttcttttgctttaaaaagtcatcaagactcatattcatccgccagttatttgctaggcgtggtgtttcatggacgacaacccctttacaggttggtttaatcgattcaaagtcgtcgcggttgaccccgtaattaccgattaaagggtatgtaaaagcgatgatttggccgttgtatgattgatcagtaatggtttcttggtacccactcatcccggtgttaaagacgatttcgcctgtcgagataattggggcgccaaaaccggtgccggggaagatggtgccatcttctaaaataaggtaacgtttcatcttttagttcactccttttttgaacgtgctttcatcaacaacttcttgtcctttacgacacttgtcaaatcggtgtctgcaacaccaatccgccaagtcaggtaaatgctcagaagttacccgttgatgacacactccttttgatatgcaatctgaccagcaaccaaggttaataaagtatcaccttgcactgcttcgccgataaatggcgtgttgtggcctttcgataagaaagtgtttgcgtcgattgtggtggtatccgttaaattaaaaacagcaaggtcagctggttggccaaccgctaactggccggcgtgtggtaagttgaaaacatgggccgggttggttgttagccagcttgtcagttgcgcgagactaaatggaccgttggcaactaaatgcgtgtatagcaagctaaaggctgtttcactccctactataccaaatggcgctttcaataacgcctgttgtttctcttctgtggtatgcggtgcgtgatcggtcgcaataatatcaatcgtcccatccattaagcccgcccagagtgcttggcgatctgcaagtgttcgaagtggcggattcattttgagcattgcgttgtcactggtaatcgctgaatcatcgagtaacaaatgatgtggggtgacttcgcaagtgacgttgaggccatcttgttttgcgcggcgaacgagattgacggtttccttagttgagatgtggcagatatgataatgaacgccggtcgcccgcgctagctcgatatcccgggcgacttgggcggattcactgacactcgcaattccgggaacgcctagttttttagcggcttgaccgtcgtgaatgacgccgccattgacgagtgattcatcttcgacgtgcgcgacgatgggcatgttaatctgggcggccatctgcatcgcttggtacattgtttgtgccgtttgtaccccatgaccatcgttggtaaagcctgctgcaccagctgccttaaacgccgacatgtcgacaattgtttgttcagttaactcattggtaatcggtgcaaattgatatgtgtggacgctggtttctgcctgattgcgtgcaaccagtgtcttgaaatctagcaagttatcaggtacgggctttaagttcggcattgcaattacgctagtaaaaccaccgtgggcaaccgctgcgctccctgttttgagtgtttcttttgtcgtgaagcctggatctctgaagtggacgtgtccgtcgattaagccggcactgacgaaatggccgtgtgcgtcataaatcgtttctgggtcggttgggactgcggtaatcgttggttcaattgccgtaatctgaccggttgcatcgatggcgatgtcgcgtttttgcagttggccgtcaatcaagacttggccgtttttgatcaattgatacatagcagatccccctcttaatgttgaatcagatgttgttggtctaataggtgttcaatgatggccatccgcataaaaacgccgttggtcatttgtttaaaaattcgcgattgtggggcttcaacgagttcgtcggcaatttcaacgtcacgattgacgggtgctgggtgcaaccagatagcactggacttaaggtgtgctgcccgctcagttgtcaaaccgtactgagtatggaatgcagtgtcagataaggtttcatcggcagcaaagcgttcgtgttgaatccggagtaacatgacgacgtcaacttctggtaagacgtcatcgagttgggctggttgtccgtattgggcaaattcaggggcgaaccattcctcagggccggcaaaatacaatgttgcgccgagttgtttgagcagttgcatatttgaccgtgccacccgggaatgacgcaagtcaccacagatgacgacttttaagcctacaaagtggccgaactcttcgtgaatcgtcattaaatcgagtaagcattgggatgggtgttgcccactcccatcgcccgcattggccagtgccatgtggaattgatcatctgcgagtaaggcgtcgtaataattattctgagaatggcggacagcaacgaaatcgacgccaatggcttgtaccgttttgagcgtatcgctgagggtctcgcctttggaagtcgaactcgtatcggcattgaagtctaagacggtcatgccgagtttgcgttctgccatttcgaaactcgtatgggtccgtgtgctattttcaaagaataggttcattgcgtagaccggccgagttaatttgcttgtcgcgccctttttaaaggcgctagcgcggttgatgagacctgcgactaaatcattggtgagttgatcaacggaaaccaacgcgttatgcttttgcattttgttgagcctccaattcaagttcgctctttgctttatccggtaaaacaaggtttaagacaatcccaaggacggtggcgatggctagccctgagaattggtattggcctaattgtaagtaggcattgccaatcccgatgacgaggattgatgaaccaatcattaagttgcgtttcttatcaaaatcgacttgtttgtcgattaagacgcgcaaaccgcttgaggcgatgaccccgaagagtaagaagctaatcccaccaattacgggtgtggggatgctttgaatcaacgcgctcagtttgccgatgaagccgaagatcatggcgaagaatgcggcgccacctaagacccagacactgtggactttggtgatggcgaggacaccgatgttttcaccataacttgtgacgggcggtcctccgacaaaagcggcgatgattgaggctgtcccgtccccggctaacgtgcggtgaagaccaggatctttaaagaagttacgcttggtgagtttgtttaagaccataatgtggcccatgtgttcggtcattgtgacaaaggcaattggtgccatgctgagaatcgcgccccagtacagaccgggtttgtaagtgacaaatgggacttggaagtctggtactttaaaccaaggggcgtccatcacgggttgaaaatcgacgatcccgaacaagacggcgatgatgtagccagcaatgatgccgagcaagatggggactaagctcatgaatcctttgagatacatattaaagccgatggtgattaacaacgttagtaaagcgactgcgaagaattttaagtcgtaattcccgtgggcattgatagtggcttgtttggcagctgtgccagcgagtgataagccaatcaccatcacgattgggccgacaacaatgggtggtaaggctttgtcgatccagtcggaaccaatcagactgactaagattgaaacgattaagtagactgccccaaccgccattgtcccttgtgcaatcccaggatagccagtcgttttcattaaagcgagcattggcacgatgaatgagaaactcgaccccatgtatgctggaatcttgcctttggtaatcaagaggtacattaaagtgccgaccccggaactgaataacgcaatccctgggtttaaaccgactaagattggcactaggacggttgagccaaacattgcaaacatatgttgaatggataaaccaatccatttaccggtgctgggtcgttcgttgacgtctaagaccgcatcgggatttctaaattgtgtagccataagtatttcctccatgtcgacgactttttgaaccaaaaaaagacacacgctccaacagattggtaggtgtgtcccttgacggacttaggcccctttttttaggcgcactaagttcaagacaaacccttttgctctctctggagacaattaaacggttcagtcgttatttagttagtttttcgatggtaatcccatcatgttgatcaatttcttccatcgcaacgcgaatttgttcgttgagcgcggttggaatatttttaccgacaaaatcggggcgaattggtaattcacgatgaccacgatcgactaagacagccaatgaaattttctttggccggcctaagtccattaaggcgtcaagcgcggcccgaatcgtccgccctgtgtaaagcacatcgtcgattaagatgacatgcttatttgtgatatcaacgggaatatcgctcccgttaatctgtggttcattttgtgtatcaagatcatgttgatcatcgcggtataacgtaatgtctagtgtaccgacgggcaatgcgatgccttctaattgttcgaggcgttctgcaatccgttgggcaataaacacgccacgggttttaatgccgacgaggacgagatctgaaatccccttattctgttcgataatttcgtacgtaatccgagtaaagacccgtttcattgtgttactgtcgaccacttctttgaccatcgtaaagactccttccaaacaaaaaacctctcaaaccgataaggtcgagaggttacagttagagactccgcgtctagtggtgctttcaccgtaccttctcggcctcacgggaccgattttaaaggcttctattaagttagacctagcttaacggagaatccttgatttgtcaatgattttcacgtaattcggttaaagttttctcgaagattgcgggtaatggggcttcaaagcgcatcatttcgcccgtcgttgggtgcttaaagcctaatacagcagcatgtaagaactgaccatgcccagctaaagttttgcggggaccataaacgggatcgccagcaactggccggttaatataggctaagtgaacgcgaatttgatgggtgcgcccagtttctagtcgacatttgattaatgtgaagtcttcaaaccgttccatgaccgtaaaatgcgtgaccgctgggcggccatcttcgacgattgcttgtttcatccggtcgacttttgaacgaccaatgggtgcatcaatggtcccctcgtcttcttcgatgttgccgtggactagcgcgatatattcacgtaagttttccttagctttgagttgggcggataaagattcgtgggcttcgttggttttagccaccatcaaaagaccagaggtatctttatcaattcgatggacaatccccggccggaagacgccgttgatttcagacaatggggtgtgcgccaataaagcgttgaccaatgtcccattcgggtggccagctgatggatgaaccaccatcccttgtggtttattgactacgaggacttgatcgtcttcatagacgatatcgagcggaatatcttctggggttaagtcgagcgtgacagggtctggaatattgacggtgacgacatcccctgttacgactttgcggttactcttacaaggttgatcattgacttgcaccaagtcttttttcaaccattgctggatttgtgaacgtgagtaatcgggtagtaattgggtgagcgccttatcaatccggcctgtttcagttgtaatcgttaattgtttagtttcagtcatgagtcactttctctttcaacaaaatagcaataaagacgcagatgacgcctactgttaaggcaacatccgcaacgttaaagatggggaaattaataaattcgatttggaacatgtctacgacgtacttaaggtggagccgatcgatgaagttaccaagtgttccggctaacagcaacgttaaacagatccggtaaaatttttcagtgcgatcagaggtataaaataagtagccaattaccccgagggccacaatggtgacgaggtagaaaaaccactgttgaccggccaagatactccacgcagccccatcgttttgaacatacgttaaactcagtacgttcggaataacgggttgggttgctgcaaaggcaacatgggcaacaatccagctttttaaaagttggtcaccgagtacaatgactgcggctaaaacgatatagatgagcatgggaacctcctattcatacaatctaccattgtccttaaaatcggctgacttgtcaatcagttttcgagatgggcgttaggatattggaaaacgtgcttttcaagctaactttctgcgcttaaccaaatttgccaaatcgccgattgtatcggcaattcgtcaaattctattaatgctcagaagctaaccgtttcaaacgcactctagaataatccgctaatcaggccatcttctgtgacgtccatgttgagggcggctggtttctttggtagacctggcatggtgaggactgtgccggtcattgcgacgatgaagcctgcgccaagctttggaatcaattcacggacgtgaacggtgaaatcagttggtgcgcctaatgcttttggatcgtctgagagtgaatattgtgttttggcgatacagactggtaagtggtcccagccatttttttcgatttctttcagttggttgatagctttgccctcgaaaacaacctctttaccgccatagatgtcagtgacaattgtggttagtttcgattgaatgtcggcgtttgaatcatataatggttggaagtttttaggttgatcgagtgcttctaagacggcctgggctaaatcaaggccacctttaccaccatgtgcccaaacactagctaaaacggctttgacacccagttcagcacatttttcttggagcattgtaacctctgcttcggtatcacttgtaaactcattgatggcaacgactacgggaatgccgtaacgttgcatattagcaatatgtttggctaagttactaaaccctttgtctaacgcaccgagattttcagtggttagatcagctaaagcaacaccaccgttgtattttaacgcccgaacagtggcaacaatcacgatggtatccggagtcttgccaagttgtgggactttgatgtctaggaacttttcagcacctaagtcagcgccgaagccagcttcagtaatcgcaatatcacccatttttagggccgtttgggttgctaaaatactgttacagccgtgggcgatattggcaaatggtccaccgtgaattaaggctggtgtatgttcaagcgtttggacgaggtttggtttgagggcatcttttaaaagcatcgcgattgcaccggtgatttcgagctcgccaactgtgacgggttgccgatcataagtgtaaccaatgacgatttggctaatgcgccgcttcaagtcagtaatgtcagttgctaagcagagaatggccattaattcgctagcaacggtaatgtcaaaaccatcttggcgcggcatcccttgcactggaccaccaagtccaatgacaacttggcgtaatgcacgatcattaatatcaagcgcccgtttccaaataattcggcggggatcaatgttgagggcatttccctgttgcagatggttatcgattagggcggctaaagtattcacagcagcggtcaatgcgtgcatatcccctgtaaaatgtaagttaatatctgccattggtaccacttgggcatagcccccaccagttgcgccacctttcatccccatgacggggcctagtgaaggttcacgtaaagcaatgacggctgattgatctagttgacgaagggcgtcgccaagaccgacagtcacggttgatttaccttctccagctggtgtgggattgattgaggtcactaagatgagtttaccatcttctttttctttcaatcgattaatggcagcgaaattaaccttcgctttatacggtccatattgttctaaatcagcggccgttaaaccagcttgttcggcaattgccgtgattggctgcatctccttagcttcattttcctgtgctatttgaatatctgacataccgcccagctcctttttatttatgatactacctagtatagctgattacgtacggaattggcagatgggatgcttaaaaagaacgatattcttcgacacacttctttgtacgtggtaaaatgagcgcgtacgctgattaacatttcaaggagggattgtgatggaacgaggaatcgttaagtggtttagcaatgctaaaggttatggcttcatcagttatggagatgacgaggaggttttcgtccattttaccgcaatccaaactgacggctataaatcattgaataaagacgagccggtattatttgagattaaagaaggcgcccgcggtttgcaggcagctaacgtgcaaaagatagcagaataaaaatacgtttaaacgctaaaaaagagccacgacactccaatgaatattttaatagacggttacgctggttcttcccgaaaaagaccaattttagccaagtaatgactgatgagatcctagcagcacttgaactaattaatcaacgactattaaagatacatcatcaacagactgccattgaaagattccgggcttgttcggattaaacttgtaatttgccgacgcttaaagaagtggtcaaggaaaataatgaccatcctagttatgcgacgcgtttatcaatttattcaagtcaattagccggtttcaatggtgacgtagaaaattaagccaaaaaggccttagcaaaatcagtttgctgaggccttttttgataacgttttaaatgataactacttgtagacggcgagtggtttttccgatagagttaatacttatagtttagttgaggagtaggatgaattaatgcggaacaaaatgacaatgagcgacaaattattatatggcgggctactggcagctgcggggggctttgattcttacacttatttggtgcacggggaagtcttcgccggattacaaacggggaatctaattttattaggaacccatttggggcagatgaaatggtccgtattattacggcacattaccccgattctcgcctttatgttgggaacaatcttaacgcgtattttacaacatcggtttgaaaaagacgaatcgattaacaaacgacaacggattatcttggggattgaagtcttggtcttaacgattgttgcgggaatttcaccgtatgtaccggatattgttgcaagttcacttgtttcaatcattgcggctgcgcaattacaggaatttcgtgaattggatggtggcccatttacatcattgatgatgactggaaatgtacggacgatggcggaaagtttttatgacgctgtttttaaacatgatcgtaaggcagccgataagggctggcaaattttacgcatcattatcagttttacgattggtgcagtgatggtcggactatgtgtctcattcttaggagaacggacgttgattttatcagcattattcttgttgatgacgatgctgattttacaattaaatccagacaagaaagtttagcctagatatgttacgctggaaggtaacttgccaaggaggttaatagatgttctttttaaaaggaatcttgatgggatttgcgtttgtcgcaccaatcgggatgcaaaatattttcgtttttaataatgccatgtcgaatacaacacggcgggcagttttcaacagtttgttcatctggttatttgatgcgctcttttcactcgtggcgttttatgggattggcgcactgattgtgcaaaacgatgcggttcggttagccattatgggaatcggtggacttttgattttatggattggatacaccattttaaaaagtgcccgcagtaccgttacgtttggcgcgttagaaccaatgccactggggaaggttattttgactgcatttgtggcggtttggggtaatccgcaagccttgattgatgggacattaatgctgggtgcattgcgggggggcatgacgagtagcgaggcgattccattcatcgtgggggttgtttcggcaaccgcgacctggttctttggtatcgccattatctttagccttttccggaaaaaagtttcaccaaaattcttgatgggcgtcaacttagtgagtgccatcatcatcatcgtgtatgggcttggtttattggtcaaagtggggacaacattgctctaggaagggatattgctttttaatttaccctgttgaatggtatccttaagtatcaaaacaaagcgaggtagaacaggatgcgcaaaacaacaatcattgttagtttagtaacgctcggcctattgacgggttgtacagccaaccaaacaaaacattcagcaccccccgctcaaaaagaatcgactagtccgcaacaaacggttcaagctccgaaagtgacgcttgaaaaagcccgtgaattgtacgcaaaacaatatcctgcatcagatttaaccgaggttgagctgaagcaatggggtaaccaaatgttttatgaattaacgggaatgaacgacaatgaagagcttcacatgcatgtggatgctcgaactggcgcaaccagtcgattgtcgaaagaagcccttgatgccgatgaacaaaatggcgtcgagcgacaccaaaagcaattagcgtttgaccaattgttgacgcctcaacaagctcttcaaaaagcgcaacaatacttcaccgggaacgtgatcaaatggtcattggaaaaagatgatggccgaacagtctgggaagtagaaggtcatcaaaaacagcaaaaaatgcaagttaaattagacgctgaaactggcgcgctaattgaaaaagaaatggatgattaaagcagtatgtaaagcgccgtcgagaataatttcgacggcgctttttttgtagcttgcattaataaatttgttatcgatttgaataaaataaattagcattgcctaactttttatttacatttcattaaaacggcgtacaataaaactgttatcaagatcaaaataaggagtgaggataatgaatcaacaagaaaagggcaagaagcacaagctgattgaatatgcgaacggcccatcacttgaagaaattaatgggacggtcgaagtaccagagggcaaaggcttttggaagatgttactagcgtattcaggaccgggtgcattggtggcagtgggttatatggatccagggaattggtcaacatcgattactggtggtcagagttttcaatacctgttaatgtccgtgattttggtgtctagtttaatcgcgatgttattacaatatatggcggctaaactaggcattgtaactcagatggacttagcacaggcaattcgcgcacggacgagtaaaccgttgggcattgtcttgtggattttgacagaattagcgattatggcaaccgatattgccgaagttattggggcggcaattgctttgtacttattatttaagattccactgctgattgcagtattcattacgattttagatgtcatgctattattactcttaacgaaaattggttttcgtaagattgaagcaatcgttgtcgcattaattgtcgtgatttttgtggtttttgcttatgaagtagcactctcagatcctgattgggcaggggtgattgttgggctagtaccaactgctaagacctttgccaccggtccagctgttggtggactaaccccattgactggtgcgttagggattatcggggcaactgttatgccacataatctatatttacactctgcgatttcgcaaacacggaagattgatcgcaagaacgaagcacaggttgcacaaacagtgcgctttgccacttgggattcaaacattcaactcacgatggcatttttcgttaatgcgttgttattaatcatgggggttgcagtttttaaaacgggaacggttaaagatccatcattcttcgggttatttgaagctttgtcagatacctcaacaatgagtaacggaattcttgcaagtgttgcccggaccggaatcttatcaactttgtttgccgttgcattgctcgcttctgggcaaaattcaacgattaccgggacgttaactggccaagtcatcatggaagggttcattcacttgagaatgccattgtggttgcggcgtttggtaacccgcttgttatcggtgattccggtattaatctgcgtcatgatgaccagtaataaaccagccttggaagagcatgaggcgctcaataccttgatgaataattcccaagttttcttagcgtttgccttaccattttcaatgctgccactgttgatgtttaccgacagccgggttgagatgggggatcgcttcaagaatagttggttgattaaaagcttaggttggttatcggtcattggcttgacctatttgaatatgatggggttgccaggacaaatcgaagctttctatggtgatcacgcaagtgctgcacaattggctactgctgatcgcattgcatatgtgttgattgctggtgtgatggcattattggtttggatgattattgaattgtataaaggcaataagcggtttgaacagcaattagcaactgaaaattaattggaggttggtcacatgtcagttttagaaattaaacgaattttagtcggggtcgatgactcagaggatgcgttattagcgtttgattatgcaattgagcgggctaaacgtgaggatttagaattagtcattgtatcggtattggaaaatgacgaaatgaacgtctatcaagcattgaacaaggattttatccacggccaatatgaggatcttgaaaaccacctacgagaatatcaagatcaagcctatgtgcgcggtgtgaatcatgtgcgaacagtaattgcagaaggcgaaccaggcgaagcgattatcgaagatgtgattcctaaggttaaacccgatttgttaattgtcggttcgaaatcacaaaagggcgttgctaaatacttcggcagccaagccgcctacatggcaaaatacgcaccaatcccagtgctggtagtgagataaagagtgcgaaaatcgccggagatattctgaggattagcctaacaacggaagaatatggcgattgtagcacgtttaaaaaagcgtgtgttcggttgcggatagcaactgagtattttagattaagcggaggttggtgcaaccaaaaagcacgtttcaaaaagatgtcgataatttattttgtcggcatcttttttatatgctaagctgagaaaataaaagtttaagcggaggatagattgtggataatgaagtcgcagctttttgggatgattttgcagcggaatactatcagattcaacaagagtcacaggtgtcgattgtcactgacgttgtggcttttttacaggatcggcgattactgcctgttgagacagtggctgacttaggtggtggtagcggccgttatttgccacctctagtgcaaaacagtcaggcttatacgattatcgacatctcggcgcaaatgctccagtatgcacaacaagaagctaaacagcatgtaccagaccaacagattgcttatcaacagcagtctgtggctgactttatggcgcaaacgccacaaaaaagctatgatttaatttggatggcgttaaatccggcaatcgaagccaatcaagcattactgacgattagcgaaaagagccgtcagtggtgtgcattcttacggctcactaaaaacgaggacgacttgttcacaccgcttgaacgttattttgggattgaacagcaagatcccaacactacaccggaaatcatcccagctgtggaaaacgtgttaaaagatgcgggctaccaagttagtcaacaaatttttcaatatcaaacaagtgaagttttcgacaggccatttttggaggcctattacgaagaattaccaacggaccaactggcagcttatctagatcaagtatttgcaactcaaaaaacacggaccagtacaacaacgcttgaatatacgttgctgtattggcacgtgttttaagagttaaattcccatcgccaccagtcctgtcggaatattttcaactggtactgggtagaatggcaggccggtttggatggccgcaatcatcatgtgattaagatccatgatttgatcggcgctgattgttgctgatggtgcaagtgcagttgggataatgagtgctgttagttggcgattgttaatgcgtgaaagaataatctcaggatcaccaaggtttgaatcgccgtgatacgcactagcggcccgttctgctaatccgagcgctttttgtcggagttcatgacgcgcatttgtgagtaacttgtcgagtaagtcgtcatctgaaagagaatcaggggaagtttggatggcttgatccatccggtagtttggattaacgacgagttccttgaagagatttaagttgccgggtaatgtgaccacgtaaatcggtgctttttcaggcagcaagtcatcaagatagcggccaatcacgcggaaatagttagtttgatcgataagttgttcattttcttttacaacaaaactgtgggttggacttgagaagccttggacgacttcgcctttacgctctgtgccaatcccaatttcaatggttgttggggcgtctttaggtaaaggataatcccgaatgacattttgttgaatggatttcaaactaaaagtagtcttgttgagacagagaatggtcccgttcagactcagacttaattccgaactgagtggacgcaggtcgggttgatcagcaattagaaaatattcagtcgtgatcggataatgaaggggttggctgtagtgaccagcagctgtgatgtaaaacgcaactgactgtatatgtgctaattcttggggagcggtacttagtaagtcctcaagttggttgagtaaggttttttcttcaggatagtcggtggttaactgttcacggatttgcttagaaaaactattgagcttaatcttgttcgcattaatggcttgtccgccagtctctaagttaatgaataacgagatgactggctgatttgaatcggcgagtaattgagttaaactttctggatataacatatcgacacctccgtttgattaacttcaccttatcatattgaacagctacctttgaagaaagatgcctttgtaaaaaataagccaacgagggacttttaatcaacttgatggaaacggtatgctaaaatggtaagtaggttaacaagggaggatttatggtatgggagataagacgaaagtggtaacacccacgaagattagcaaaagtattcggacccgtttttttgtactacaaatggttgtgattctaatccttggcgcgctcacaattaaacttgtgagcggctttagtccattattgacggattcagaaattctaaaaaatacaattttgacagcttttggggcaaccttagtcgcgcttgtagtgtggtacctatcgtataagattattgcaatgcgcattcggcgccaaatcatgaataaagagctagaggatagctacacttttagtttgaatcatgctgctagcagtcttagcttacatattgtgtactttatcagtatgttggtgattgtctggttgatgttgagtgctcaaaacgtgcgccagtcgctagatggcttacaccttttcaaaggtgatcaaccgattgtccggctggtcgataatcacagcatgaagcaaatcgagcaattctatcaagctgataagcaacaaaagatgacgtatcttggcagcaatcgagatgttgcttatttcaagattaataatgcaacgattagcttaccattagccaagattcaattctatggtcaagatgaagcgccgactggccatcagaaacaagtgattcaacattatcacttaaaagatgtgcaaaataagaaatacctcaaacctaatatttatattagtgaatcaggcttacctaaggtggccattatgaagatgtaccaacattatgagccacaaccaacggataagattcataaactcgacattaaataggataactaccacaggagggctggattaaacggctttcatttggtacagttagagatgaatatttttttaaataaaggagatcaagtcatgattgaagcagtaaacctcagagcaggaatgacgtttgaacaagacggcaagttaatcaaagttttagaagctaaccatcataaaccgggtaagggaaacacggttatgcgtgttaagttgcgtgacttacggactggctcaattgttgaaacaacaatgcgcccagaagttaaagttgaacaagcaatgattgatacaaaagatgttcaatacttatacacacaagataacgtggcattcttcatggatcttgaaacttacgaacaatatgaaattcaaacagctgctattgaagctgaattaaaatacttattagaaaacatgaactgcaagattcaattcttcggttcagaagtgatcggggttactttaccaactactgttaacttacgggtcgttgaaacacaaccttcgattaaaggcgcaacagtgactggttcaggtaaacctgcaacgatggaaactggtttagtcgttagtgtccctgatttcatcagcgctgacgaagtccttgaaatcaacacacaagaaggcacatacgttaaacgagcagcaaaataacaagcttaaggccgactagtcccatagtcggtacttcaaagtgaagccaagatggttttctttcgataaaagaaggaatcaccttggctttttatgtttgggtaaagggacaaaaaaataacagagaagcaacttatgatggattgcttttctgttagttatcaaaaattatttgacgcaaatcgtggctttaacaaacaattttagtgaatataaacagttattacggtaacgagtccgaaaataacgccagggatgttagaaataataaccggccaatctttataggttttattccagccataggcggtccatagacacccattaattgttgcgactaagggctgtaaaggtgagacaggtgaccctgaaaaattagcgataatttgggggatgtatgaaacatacatcgtaatacaggtgattgttgcaaccttgctaagtaattttaaacgtttaactttcttagggtggacggcgttttcgccggtagggtattcgccagtatcaatgcgcataatagactccgtttcatgattgaattttattatatatggttgacttgaaaccgcttaaattctatagtgatagtatgcacgaagtgaaagagagtggaggttttacgaatggcaaagaaaataattcttgattgtgatccaggccatgatgatgctgttgcaatgatgttagcatacggcaatccagaaatcgatttgttggcagtgacaacggtggctgccaatcagacgttaacgaaagtgacgcgcaatgccctcgcagttgcgaccatgatcggcatgcacgatgtaccgattgctgctgggtgttcgcgaccattaattgaagaaattaaagtagcagctgatatccatggggagactggccttgacggggttgttcttccagaaccaacggtggcgcttgaaaaaagtcatgcagttgatttaatcattgatttaattatgacgcatccagctaatacaattacattagtgccaacaggtgcgttgaccaacatcgcaatggcggtacgcaaagaacctaagattgttgaacgcgttaaagaagtcgttctaatgggtggcggttatcacgaagcgaatgcgagtgcagtggccgaatttaacattaaatttgatccagaagcggccaagattgtattcaatgccggctgggatgtcacaatggttggtttggatttgacgcatcaagcgttagcgacaccagatattgttgaacaaattgaaggcattcatactgaaacgtctcagttcgtggttgatttgttagcctttttccgcgatatgtacaagaaggggcaaaatttcgatgcaccgcccgttcatgatccatgtgccgtggcttacgtgattgatccaagtgtgatgaccactaagaaagtgcccgttgatatcgaactcaatggaacattgacgcgtgggatgacggtcgccgattttagattcccaattccaacagactgtcacacatcagtcgctgtaaaactcgatcatcagaagttctggggattagtggaagacgcaattaagacgatcggctaaatagtcaaaatacttgagtagagaaggcgttgtacatgtatcacgcattagaaacccgttatcaagggatgcaatataaccgcgtcggacattctgggttgaaattaccagcgatttcattagggttatggcataactttggtgaaaccgataagatggcgactcaaaaggaaacgatttttggcgcgttcgatatgggcatcactcatttcgatttggcgaataattaggggccaccagcgggcagcgccgaggaaaactttgggcggattttacatgataatctgcgtcgctatcgtgatgaaatgattatttcatcgaaggctggctattatatgtggcccggtccctatagtgagtggggctctaagaagaatattatcgctagctgtgatcagtcactaaaacgacttcagtcagattacgtcgatattttctatcatcaccgaccagatccagatacgccgattgaagaaacagctcgggccctagatttattggtgcaacaaggaaaggcgctatatattgggatttcgaattattcggcagaacaaaccaaagcgattacgaaggttttcagagcgctcgggacaccctttattattcatcaaccacgttataacatgctcgatcgatggattgaagatggactaacggatgtcttggcggatgaaggtatcggtgcaattacgtttagtccgttggcacagggattattgaccaatcgttatttaaacgggattccagccgattcgcgggcagcttgtccagatagtcccttcctatcacctgaaaaggttgatcaaacaatcagtacggttcaagaattgaacaaaattgcgcaacaacgtgggcaatcattggctgaaatggcacttgcgtggaatttacaacagccgactgtagccagtgtgttagttggtgcttcgcgcttgagtcaattacaagacagtgtgcatgcactagataacttaacgtttacggccgaagaattagcggctattcaaaaaatattagcataattaaaacgacgactagctacgtaagctagtcgtcgtttttttttgtttttattcagctgtttcagttgcggctgcgtttgcttggattttaccaagaatggcgcgtgagaaaggtcccacgatgatcagttgtaatggtaatgcgacgatgacattcatcaaccatgtgtgacgatagacactacctaagtggtcagggataccaccttcgatgagaattccgaaaagtgacatacatgtgaccatgccgagaatcattaaacatgaaattgtgagaatcatgactaatttattttctttgttcaatggtaagctaaatgcgatttttttagcaattgcaccgacaacgaatacatctagaataaatgcgacgatgaaacctggaattaaaccggtagacaaagcaccccatgatagactatcatgtaaaactaagttatagatactcattccaagtaccatgcagaaacacattaatgttgtaaaaataataccttcttttttattggttggcattttaaattccttctttctgaaaagttaacagatataaccgtatcacataaaaaatttcggcgtaagcttttttttcagaaaatgagaagtttcttctttttcaatttcaatgggaatctcgccatcatgaacggcgtgaaaaatcgaaacgagcaataatgcgcagacaaaaatcaatgggaacccagcaatcacgcaaacggcttgaatggtttggaaactaccgacaagtacaattccaagtgaaaatagaatgaaaatgatcacccaagccatccgattccaacgattaggttgttctccgattttcaattcaagactggtaaatgatgagacgatgaaggccgaagaagagatcgttgtcgccaggaaaatgaaacatgacagacagaaaattgctaacatgataattttgaacggtaaggtcgtgatgaccgccgcgatgacagcggcttgtccttgggtattcaatagatgaacaagatcgatttgaccggaacgttgtaagaagagcgcataaccgccaagtacagcgtaaaagctcatacaactaaatgcgccgtatgtcgccattcccaataaaacttggcgaatggttcggccgcgtgaaatccgagcgatgaataagcccatgacaggcatgtaagataaccaccatccccagtaaaagagggtttcgtgttgtgcgaacgcactgtgtgcaccagtctgatttaaacttaaacgcccgaagttaccaaagagatggaagacatcgcggccttcagcgccaattagcttgaatgtcggaccgattagtaagacgagtaataaaaagccaatggcagtatagatatgccaagcactgagcttcttaatgcctttatctaagccggcatataccgtgagggtgaatagcaccagtaagataatgaagagggcaagtttaagccagatggtatcattcaaaccggtcattgtgctcaagacttttgaaatcacgggaatttccattccgattgatgagccgatgccccccataatgccgaaaacaacggtaaagtcgattaatttgcgaattatttttttgtaaggttgtggtccttctaataggtcgattgcggcgcttaaacgttgtacccgtaagttcttaacatagagagcgtagccaattgcgacagtcgcggtggcaaaaatcatccatgccatgggtccccagtgaaattgcccacagacgttggcgtagcggtatgcttcagccgagaaaggtttagcgccaaatggtgggttctgtaagtattgcagtggatcagtggtactaagcattaagatgctagcgtcaatcccagttgcaaaaaccatactcccccattggaagtcgttatattctggcttttcatttggttggccaaggcggatatggccatagtgactacaccccaaccaaaataggaaaataaaattaatgatataaataccaatgtaaagccatttagaatgtgccgtcatcacatcaagtagttgtgaaatcgactgctgaagcgtgtcaccccccaacattaaaaatgcggagacaatcccgaacagtaacatcgtggggatgaagacgactttatcaacattcttgcgctttaaaataatattcctcctgaatttgttaaagtctaggttgctggatcaaataaaaaaagcgcccatacaattggtcaactgaccacctgtacaagcgcgttattataacgtatacaaatgaagaaacagcctaacttgatttacttcttactaataggatagcacttatctcaaatttgttaagggtcgattttacggccgtgcggttgttaaccaattaagatagtcttgttcgcggttaatcgcgtgttctaaaataagataatgaccatagtgcgcatccaccgcagcttgttggctgaaaagggtttgacgccggtcgagtaggtgatctagtttggcttggtgtaagtttttttgttcggtgaacattgcgtctaaatgagcatcattttttgagtcgataaagtatagcttcaaaataaattcgtctttgctggcaataatttcgctggttggggagtatcgccactcgtcaaaaaaggcaatcccatctgcagtgattgaatactgcttcttttttaattttgttccggcgatcaattcgacgtgggtgatccgatcagcctgttcgagtcgcttgagttcaggatagatttggctgtgttgggcttgccagaactcaccgatatcatcttcaaagacgcgttttaaatcataaccggttttgggagactgatttaacagcccgagaattaagtattggagaatgtttttttgggccatctgaaagtgcccctttctgtgaaatcaacttagattaagtatagcacaggccagtgttgaaaaatggttactttttataagtctttttaattgcatttcataaatagttagcgtaggctatttcaatcggggaaaagtgcgttcaagcttaatcaacttttgagtattagtacggggaagcgaattagcgacgaagtcgatgatttgattcacggtgctaagcgcagaagtctgcgaattaaaagcacgttaaagaaaatgagtgcgtcaaaagtggttatcctgtgaggattagcctaattagccaaattagcggcgtaaccgattgtttggctaatgtagctaaccggaacaggatgcttttgaaagcacggtaaaaaggagttttatcaatggcaaaaaaatcaaaagtggcaaaattagcaaaacaacgcgcattagtagcgaaatacgctgacttgcgcgcagaattaaaagcaaagggcgattacttagctctttctcaattacccaaggattctagcccagtgcgattgcggaaccgcgatgtaatcgatggtcgaccaagaagtttcatgcggcaatttggtatgagccgcatcaactttcgcgaattagcccataaaggccaaatcccaggcgtcaaaaaagcaagctggtaaaaaaatgagtgcgttaattcgcggttagcctttgagcacttgcctaatcagaaggataagcgccaagggcgattgtctggttgatgtagcaaggcgcagaaggttgcgaattaaaagcacgttaaagaaatagaagcgcgtttgaaacggtttgacttcgagcactagcctaaatctgtaaatgagcgacgtagtcgattgtttacggattggagctaagcacagaagtcagtttcaaaaagcgcgttaaagctagaaccccacaaaagaagaggtcgtcccacggcctcttttcttgtggggattgaatacgaccttaccggtggtcttgaatttagcgttagtgggttacgaagatgtgatcggaacggccagcgggttgtttagttttggctactacctcgcaatcagcgccttaacgtacggcatgagtctattgcatacgggatcgaatactcgattaccgttatacatgatcatgattgtcggcgtgatggctctgagttatggattcgggattcgttcaaaagcagtttaaatgtaaaaagcgcgcagacaatcagttgtctgcgcgctttttatttaagcaagttgttgttgcaaaccagcgaggaaaatatcgaggcctagcatgaatttttccagtgagcgttgttgttggtgccgatgatgttcaaaagtttttaagaaagcattgtaatgattgtcagtcgcaatctgctgcattttaagcggtaactgtgcaagataagtgtctttatgttgtgagacgcgatgtttcatctcaagctcaccggtgatgtcagtgaagagaccggacatgaagtgatcgatggattcaatcgctaggcttgcttgttctggcgtgaaaccggcatccaaaaggatttgaattaagtggttgataagacctaggcgggccttagttgcagggacggtccgcatcatcaactcagcggcatagggctgtgctatgtaagtggtgtaaatggcgctaaaaatttggcgaatttggtctgtccattctaaggttgtgttacatggctcaatctcaatttgttgaataatgttatcagccatcgcctgtaggagggcttgtttgttttcgaaatgccagtaaaatgtggccgccccgatgtctaattgattggcaattttacgaattgaaagggcatcgacggtcccggatgcttgtaaaatttcaaacgcggcagtgatgatttgctcggcagagattgactgttttaccatattaatgaagctccttcactttttatgaaaagatgattgtaattcgttttaaaatttgataaagtagtaactcgaacactgttcgattatactgtacaggatttgtacaggagattcaactacagaaaaagagggatgctcatgtcgatacttaaacagcacttaaagccttattggggcgtgtttagtctttccattttagcgacggttatttctgttgcgtcttcactatggcaaccaaaactattacaagatgttttggaagggattatgaaaggcgatcaagataaggtacgtcaaattggaatttatttgattgtaattgccgtggttggtttaattgcgggcgtggtcaacaccattacgtcggcgacgacggcgcagggaatgactgccgatatgcgggaaactactttccggaagatacagactttctcatttgccaatattgaaaaattctcagttgggaatttatccgtgcgtttgaccaatgatatgacccaggttcaaaacgtcattatgatgacgctccaaacgatttttagaatcccgattttatttgtcggcagtttcatccttgcgatgaattcgattccgagtttatggtggattatcgtgctcttagtgatcgcggtcttcatcattacattcttatcaatgggttcgatggggaaacacttcggtgccatccaaaatttaatcgataagattaataacctcgctaaagaaaatttaatgggcacgcggattgtgaagtcttttgtccaagaagataacgaaatcagtcgcttctcaaaaacaagcaatcaattagaacaccatacgacaatcgtcgggatgcttttttctgtgatgattccagcgttcatgttggtggcgaacttagcggttgtcgcatcaatctatttcgttgggaacttagtcgatacggatccagaagcgattgcggcgattgcctcatttatgaattacttaatgcaaatcatgatgtcgatcatcatgggcggcatgatgatgatgatggcatctcgtggggcagtttcgttgaagcgactccaagaaattctttcaacagagcctgatatcgtttatccagatgtccctgatcaagacttagcggggacgttggaattcgatcacgtcagcttccgttatccagaagacgatcgtaacacgttaacagatattaatttcaaaattaacgctggtgaaatgattgggattgtcggcgcaactggggccggtaagtcaacgatggcgcaattgattccgcgcttgttcgatccgactgaagggcagattaaaattggcggcgtgccaatcaaagatttaaacgaacataatttacacagcgccgtttcatttgtcctccaaaaagcgattttattctccggcacaatcgcacaaaacttgaagcacgggaaaaaagatgcggatgacgccgatatggaccgcgcaacggggattgcccaagccaaagagttcatcgaaaagcttgctgatcaatatgatgcaaccgtcgaagaacgcagtgcgaacttctctggtggtcaaaaacaacggctctcaatttcacggggggtaatcgggcaaccgaagattctgattttggatgatagtactagtgccttagatgcccggtctgaaaaattagttaaagaggcgttagaccgtgaattagctggcacaacaacactaattatcgcgcaaaagatttcatctgtggtcaacgcggatcggattttagtgttagatgaaggtcgtttagtcggtgttggtaaccatcatgaattacttgaaaccagtgatgtctatcgagaaatctttgaaacgcaaaaaggaaagcgaggataaccaatgcgagaatttaaccgagcaatgaagttctttttccattatctaaagcggtataaaccttcttttgcaatcatcctcgtgatgactgtgattgcgacttatcttcaggtgaaagcacccgaatatatcggggacgcgctcaatgagttagtcaaatatgcaacgaaatttcaaattttaaaagcccaacatttgccaaccagtggggcatctaaagacgccttcgtagaggtgattgtatcgttgattttattctacgtctttagttcagcagcgacgttggtatcaggcgcggttttctcacgcgtcaacgcgttatcaaccaaccggatgcggattgggttattcaataagctccaaaaaatgcagattaaatatttcgaccgtcattcagatggcgatattctcagccgctttacgagtgacttagataatatttacaatgcgatgaatcaagtgttgagccaacttgtatcaggcacggcgctcttaattggtttattgattatgatgtttagaaaagatgtgcagctcgcttgggtgacaattgcttccgtcccaatttcattcatccttgcttggatcatcattaataaagcgcaaaaatacgttaatgtgcaacaagatgaagtcgggaaactcaatggctacattaacgaaaaaatcacgggccaaaaagtgattattactaacagccttcaagaagaaacgattgatggcttcattgaacataatgaaaatgtccgcaaggcgactttaaaaggtcagatttattctgggatgatctttccgttgatgcaagggatgtcgttggtgaataccgcaattgtgatttcctatggtagctggttagcggtgaacggtgacattaaaaagtcgatcgctttgggcttagttgtaacattcgttcaatattcacaacaattctataaccagatcgcacaactttcatcgagttacagcatgattcaattggcaattaccggtgcccgccgagtgaatgaagtgtttgatgaagacgatgaagtgcgtccaaccgacggtgtgcaatttgagggcattgaacgctccgtgaccatggaacatgtcgactttagctatttaccaggtaagcaaattttgcatgatgtgaatatcgaagtggataagggccaaatgattgcgttggttggtccaactggttctgggaagacaaccgtcatgaacttgatgaatcggttctatgatgttgatcaaggcgcagtcaagattgatgacattgatatccgtgaaatggatttggatgcattacgctcgcacgtcggcatcgtgttgcaagaatccgtgcttttctcaggaacgattcgcgacaacattgtcttcgggaaacccgatgcaacagatgaagaagtggtggcagctgcccagcaagcccacattcatgacttcattatgacgttagatgatggttatcaaacggctgtcagtgaagaagataacatcttcagtaccggtcagaaacaattgatcagtatcgctcggacgattatcaccggtccagcgctcttaattttggatgaagcgacaagtaacgtcgatacggtgactgaaagtcatatccaaaaagcgatggacaacgtcatccaaggccgaaccagtttcgtgattgcccatcgtttaaagacgattctcaatgcggatcgcattatcgtcctcaaagacggtcgcatcatcgaagaaggcagtcaccaagaattactagacgaaaaaggcttctacgccgaactgtacaacaatcagtttgtatttgaatagagtgcgacagcgagcgtttatattttgaggactagcctagtcagtcaaatgaccaatttattggccatttaattcaaccggcaacttgcccagtgcgctgagcgtcaattgatgcgttgcccgcgaaatggcggtatagaggcggttgcggccgacagttggctcggtataataattgttagtcagatcgtacaacaaaacgttatcaaattctaaccctttagccagcgtcagcggtaaagtgaaggcgccggtttcggggagattcgtcgtttctgtggataagtggtggacatttttgaggccatttaaccgctcgtcaaagtcaccagcaggcgtgatgatggctaaggtttggtcagttggtagttggtcaatctgagcttggatttgggtgaggtagtcgttaaaatcagtcgcacaaatcgtcgttggccgcttgcctgctggttgaacggcatggacatctgttaaatcggtgaatagttgactaaataacgtcgtgattgcaccggatgagcggtaacttgtgcgcagtgccgcagtttgtagttgtggaaaaatggtgggtaattgttcgaattgtactttatgcggggtaatactttgatgctgatcactgaaaaccgtgaactgtgctttggggaaaagttgtttaaaaagagataacgtgcttgcgtgatagtcctgcacttcatcgataaagacctgcttaacgtttgggaagacgtgatgcgttaaataagcataaatctgagctgcaataacagcatcaatcggtgtttgacgggcaattatttgatcaaaagcaagccattgataaccgcttagctgatcagctaagtcttggtaatcatgacgaatcattttgcgtgctagcggtgctagtggctcatcttcgcgaattaagcggtcgaataagcgctgttgctcggtttcagtgaggctttcaagtcgagttaaagcatctgctgattgggcttcatttgtgatgctttcctgtagacaacttgtgagttgttgctgagttgcttgtattcgtttatcaagcggggtatccaccggtgtttttaagaagaattggtagcttgttgcggcatcaatcgtcagcggtaaaccagggcttaaagattggaaatcgctcgcctgcaacgttaattgtgtgatggtcaaagtagctggttgatcagcgatggggagtgcggctagatcagaaggtaacaattgcgccaatagttgttgtagggttaagttgactggtgtttgttcacctaagtctggtaaaacttgggcgatatagtcttgaaataggcgatgcgttgaaaaatgaccgatgttttaccactgcccgcaatcccatcgatgagtaaatggtcagtcgtttgttgctgaataatcgcgttttgttccttttgaatcgtcgtggtaatggcgctcatttgcgttgttttggcttcttttaaagtggctaataacaagggatcttcgatggcaatctgcgtatcaaagaaatcgattagctgatcagcttgaatttggaactggcgccgtcggtcgagattgaccgcaatggcgcgaccgttagcttgataactggtggggccgaatgtttgctggtaataaacatcggcgataggtgaacgccaatcgtaaatcacaggatcgccggcttggtttgtgaagctagctgaaccaaggtaaaaatcttcggcgtctatttcctcaggaaaagtcagcgtgatttttgcaaagtagggttgctctaacagccgtaaggtctcatcatgacgtgcaacgagcgaatcggttttcaggttgagcatatcgatttccttgttgatactttctaaagcagcgaatgtatcaagattatcagcgtatgaatcgaaattgagtttggcttcaccggtgatctgcgctttgatggtgttgccgtttttctggttttgcgattgggcatcattgatggccgtcaaagtggtggttaattgttgataaacagtggatagatgcgcttgttcttgattgaaatcagtcgtcattcaaacagcccctttacaaagttgttcccctagtttagcaagcacgttcaaaaaaggagtgcgtcatcaacgggtagcttctgagcatttgcctaacttagcgaattggcgctgcaagcaccgctttactaagtgtagcaaagcacaggaagctgttgatgaaagcacgttcaaaaaaggagcactgactgataagtcggtgctcctttttgcgttagtctgcttttatgatggtttcaattagatcaaaaaatccagctgcatcaacgtcgtagacgagtttagccggacgtccgtttttagttaagaacgtgcgcccgccggcaattccgtttggaatgacatcacatacaatggcttttgttttaacgattgttggatcaagaaggtaacaagttgttaaaacgtcccataaataataagttgaattagttttgaaatggaccagttgaggaacaaaggcgtaacaggtgccgataaagtccatcatggcattggcacgtttgctagcccaacgttggcgaatcgccggcgttaagggaacattattcgtactttcgagcccgactaattcaatagggatttgtgtatcgaagacagttttcactgcttcgggatcccagaaggcattccattcagcagtaccatcagaatcgggttcagcaacgttgccttgttcaagaaaagaaccgcccatccaaagaagtttagcgattttatattcgatgcttggattgatggcgagtgcgcgtgccaagtcagttaatgggccggtaaagagcaatgtgacgggttcggttgcttgattgagtttagtgattagatcgagatgtgcggcttcaggactcagaggcgtttgaacggtgccacgttcattgagcacgggaagtgcatcgactgagtaagcgtcagttcgccattcttttggaaaaggatggactgcgcgtgagtcagaagcggccacagctaaccgcgctgattgatctgaaaacgtatcaatgattttacgactcgcgctaacggctggttcgacatatgaatcagcgccaattacgccgacgccaagtagtttgattgtcggcatttgtaggagcagagttaatgaaatcaaatcatcaacaccgccatcgtgattaaaatagacttgtgtttgcatggttcgcctcctgattgttcgttagttatcaattaatattagcattatctatatttcttagcaacaaatacaatataaacgaacaatattttataaaatgaaatcaatgtattgattttatgtcgataacgtgtttataataaattatcaaatttattgacggaggcttatttcatgaaaaaaagtttggtcgtacttttctcgacagtccttgtattaggtggcgtgttagccgggtgcgggagtcaaaagacagcatcaaagaaagcaacgcacacagccgctttagtcactgatggtggtgggattgatgataaatcttttaaccaatctgcctgggaaggtttggaaaaatggggtgctagtcatgatcttaaaaaaggggtcaatggttacaattacgcacaatcgagttctgatgcggactttttcccgaacattaataagttaatcaaggcaaaataccaaacaatttttgcgattggctataagttagataacgcggtcagccaatctgcaaagaataatccaaatgttaactttgcaatcatcgattcaaacgttaagaatcggaaaaacgtcgcgtccgtcaattttaaaacagaacaatcatcattcctagccggggttgccgctgcgaaaaccactaagacgaataaagtcggctttgtcggtggaattgatagtgccgtcgtgaaaacattcgaagctggttttaaacaaggggtgaaagccgttaacccagcaatcaccgttgatgtgaaatatgctggttcatttacgaaagccgatgtcggccaatcattggcaaccgcgatgtacaacaacggcgcggatgttatttatcacgctgctggtggcactggcgctggcgtctttaccgctgctaagaacatttctaagggtggtcaaaaagtctgggtgattggtgttgatcaagatcaaaaagccgatgggaaatatgatggtggcaacgtcacattagcatctgccgttaaacaagttggcacagcagtggaagatcttgctaaccaagctaagaatgataaattccctggtggcaaaaccgtcacatatgatttgaaagacaaaggcgttgccttagtgaacgacaatgcttcccctgaaacatggcaagcagtcaaagaatatcaacaaaaaattgaatcaggcaccattaaagttgctgcagaataacgactattgaatgctaaaggatggcagcagttatcagccatcctttttgtatgcttaatgaatggagcgtaaaaatggcaaaaactgtgatagaaatgcagcacattacaaaacggttcggcgcctttaccgccaatgatgatatttcattaaccttgcaacagggtgaaatccttgccttgcttggtgaaaatggtgcggggaaatcaaccctgatgggtgttttgaccggacaattaaagccgactgcggggcaattactggtgaacggacaagcagtgaccttaaatggccctcgacatgcaaaagccctcgggattgggatggtacaccaacatttcatgttaattccggcttttacggtcttagaaaacattatcctgggtgacgaaccaactaaacagggccggattgactatgcaacggcgcggcaaaaggtcacggctttagtcgataaataccaactggcgctcgaccttgatcgaaaaatcgctgatatttcggtcgggatgcaacagcgggttgagattatcaaggcgctttaccgagaagcaacgacattgatttttgatgaaccgactgcagctttgacacagaatgaaattcaagccttgcttgccatttttgagaagttaaaggcggaagggaagtcgttgatttttatcacgcataaactaaaggaaattaaacaagttgctgatcggtgcgtcgtgattcgtgccggacgtgtgattgatacggtactagtcgcacaaacggatccgacaaaattagcggaaatgatggttggccgtccgcaacaagcccccacaccgaaaatggctaatcaaggcgctgtgatgctatcggtggaacatgtcgctgctcgtgttgctaaacgcactgttctagatgatctgggattgaccgtgcatgcgggagaaattgttggaattgctgggattgatggcaacgggcagagtgagttaattcaggttttaaccggacaattaaaaccgcagtctggaaaaattgaattaggaggtcagtcattattgaaacggacaccacgccaaattagtgaacaaggcttagggtgcattccagaagatcgccagaatatcggtttgattttgccactgtcgattgctgaaaatttagcgctgaaggattattaccatcaaccgtatagtcatctaggctggcttaattatcgggtgatcaatcaaacggcgcagaaactgattaaacgattcgacattcggacgcaatctgaacaaacgcttgccggagaactttcaggtggtaatcagcaaaaagtggtggttgcgcgcgaaatcgccaaacaaccaaaagtcttgattgctgccaatccgacccgcggtgttgatgtaggtgcgattgaatacattcatcagagcttgattgaacaacggaaccaaggctgtgggattttacttgttagttttgaattagatgaaattttaaagttagctgaccgagtacttgtaatgcacgccggtcaaattgttggtgaagttgatccacaaaccacaacgagtcagacgctcggattattaatggccgggcaacaaccagtgggagggcgagacgaatgaataaacaacaatcttcaggattaatcattgcaatcctatccgttgtggcgggactgttagtgggcggagttgtgatgttggtttttggatattcgcctattcaaaattacagtaacctctttaatggcgcattcggcgatatctattcgattggcgagacattacgcaatgcgactccgttaattttgacagcccttggcttttcaattgcgagcaaagccggctttttcaatattggtgggtcgggtcagctattagtgggctggtttggcgcgattgtctttgcactccactttaaaaatttaccggggattctcttgattcttggcgcgattttagcggggatgctgctcggtggcttttggtcttggttggccggttttttacgggcatactttgggaccagtgaagtgatcacaaccatcatgttgaactacatcgcattgtatttcgtcaattttgcgattaaacgttggttggcgccaaaaggcagcgactcatcggccaacattgtccctaaagcaagcttgcggaccccttttttggaacagattaccaatcactcaacgtttcactggggctttttcatcgcgttagtcttggtgattgtgatgtggtggtatttgaaacggtcgaagactggatttgaaattaaggcagttggattgaacgaacaagctgcacgttacgcggggatgaatacgaaacaaacgattatgtgggcaatgctattatctggactactagctgggttagcgggggctgtcgatggtctagggaattatcaaaatatttccgtttcaaatgccttaccagatatcggctttaatggaatggcggtcgcgttattagcgaatgggcatccaatcgggattatctttgcggcgattttattctctgctttacagattggtggcttaagcatttccgtctactcaacaactccgacagaaatcgtcaatatcgtgattgcatcgattatcttcttcgtgggtgtgcgcttcttatttgaacaattactcaatcaccgcttactgaaaaaacacgcgttgatgaaagagaggcttgaaaaataatgacaatcacaatgattttaatgacgatttgtgcgaccacgttagtttacgcggcgccattgatttttacagccttgggtggtgctttttcagagcatagcggtgtgattaatgttggtttagaagggattatgattgttggggctttcagcagtgccgtctttacccttcaatttagtacggtttttggcggattgacgccgtggattgccttattggttggtggactgtttggtgcactgttctccttattacatgctttagcgaccgtaacattgcgcgctaatcacattattagtgggacggtgttaaacctattggcgcctgcattgtgtgtcttcttaacccgtgtgctgtatagcggtaaggggcaaacgccggtgattaatcaaagcatcggtaacttcacattccccggcttggcccaaattccagtgattggccccattttatttacgaagacgtcgttagtggcttacgctgcggttttggtcggcattatcagttggtatgtgctgtataaaacgcggtttgggctgcgcttgcggtcagtcggtgaaaatccagcggcagccgatacactgggcatcaatgtgagtcgttaccggtatatcggggtcatgttgtctggtttgttaggcggcattggtggcgcggtgatggcgcagtcgattacgttaaacttcagcgcagcgacgatttcaggtcagggcttcatggcattggcggcgatgatttttggtaagtggcatccaattggcgcgacaggtgcatcgattttcttcggactcgcacaaagtttgccgattatcggcggctacatcccaatactggccggtgtgaatagtgtctggttccagattgcaccatacgcgattacgattattattctggtgattttcttgggcaaggccgtcgcaccagcagcggatggcgaaaattatattaagagtcattaaaagatcattcaaaaaggcgaacacaattgcttgtgttcgcctttttaggctaatcctcagcggataaccatttgcagtcgcacgctattctaagtagtcctcttttaattgtttgatttcttctggtttgagggccattgcctttgataggtagttttcgatgttgccgtattcttgattaaccgtgtcgcggacaagttctagattagcctgtgtaatgctcttagcgttcattgaagcgacctggctatcgttacttgaaattcgggttggggttgctgagctgagtcctaggacctcatttgagaggacatagtcggcaacgattgttttccagtcgacgccgagagcacttagaattaaaaaagttgcgacaccggtgcgatctttaccggctgagcaatggtaaaggactgcaccgtttgtatcgtgattatttaatagtacggtaaataaatcgcgataagctgcttgagcatgggagtcggtgatcaattgttggtacatccgatccatacttgatcgttcgggagtagcagcttcttttttactaaaaagccgcattaggccttttttggctggctttttaggggtatcggcttggtcagtgaatggaaataccgaaagacgatggtaggttagttggttgtcatcaaatgggtcgggggcgaccttgatttcatgacgtgaacggaaatcgacatcgtaagcaacaccgtaatttaagagatcctcaatatcagttgcggttagcgcgttcaaactacctgaacgtaataatttgtgccatttaacggacttgccatcaaccgtttggtaaccgcctaattcgcgtaggttataacttcgtgttaaatctagaacccgttgttgttcttgcatgccaatccatcctttataatcagttatttctattgtataacgaagctgggtggtgtgcacccttattttaaatgttcgtgattcattcgtacacgatattgatgaaaatgaattttcaataagagtttattgacgtttgcagaaaaatctgctaatattttatcaaattttaaactggttatcgattaaagataatacgaacaatcgatgggtcggcggttaatttagttcacaaattggaggaagattatgtctgcatgggaatcaaagtttacaaaaaaagggtttacgttcgatgatgttttattaatacctgcggagagtcatgtactccccaacgaagtcgatttaggggtgcaacttgcaaagaatatcaagttaaacacaccaattatgagtgctagcatggataccgttacggaagcacccatggcaatcgctatggcgcgtcaaggtggtttaggcgtgattcataagaatatgagtattgaacgtcaagcagatgaagtcttgaaggttaaacgttcagaaaatggcgttattattgatccattttatttaacagcggataaacccgttagtgctgctgaagatttgatgcgtaaatatcgtattagtggtgtcccaatcgtttcaaatctcgatgatctaaaattagtcggcattattacgaaccgtgatttacgttttatctctgatttctctgctgaaatcggaaccgtgatgacgcacgaagcacttgtaaccgcacctgtcggcacttctttagaagaagctgaacaaatcctccaacaaaacagaattgaaaagttacctttagttggtgatgacggtcgcttagccggattaatcacaattaaggatattgaaaaagtgcaagaattcccgaatgcggctaaggatcaatatggtcgcttattagttgctgccgctgttggcgtcacaagcgatacttttgaacgggctgcagccttattgaaagcaggggctgatgcgatcattatcgatactgcgcatggtcattcagctggtgtgttacgtaagattagtgaaattcgcgaacgcttccctgaagcaaccttgattgctgggaatgtcgcaactgcagaaggcacaaaagccttgtatgatgctggggttgatgtcgttaaagtggggattggccctggttcaatctgtacaactcggattgtggctggtgtcggtgtaccacaattaacagccatctacgatgctgccagtgttgcccgcgaatatggcaaaaccatcattgctgatggtgggattaaatattctggggacatcgttaaagctcttgcagccggtggaaacgttgtgatgcttggtagtatgttagctgggactgacgaagcacctggcgaatttgaaatctatcaaggacgtcgtttcaaaacataccgtgggatgggcagcttggctgctatgtcgcatggttcatcagaccgttacttccaaagtggtgtgaatgaagccaacaagttagtcccagaaggcatcgaaggtcgtgtggctgccaaaggcgcactcggcgatgtaatttaccaattacttggtggcttacgttcagggatgggctacgttggtgctgctaatttacaggacctacaagataatgcacaatttgtccaaatctcaaatgctggtttgacagaatcacatccacatgatgtgcaaattaccaaagaagcacctaactattcagcacgttaattcaaatcatttctatcagggtttaagtcgagcgttttgcacgacttaaatcctttttttgtggttaaatgatggggaggatttaaagaattctttaaccctaagtagaagatagtttgttacaatgaaagcgaatcatgcaaaatgatgttaaattaaacgaggtaacgattatgaaaattctaattgtagacgatgataaagaaattgttgaattattaagtatttatgttaaaaacgaaggttacgaacccattcaagccttcacgggtaaagaagccctgactaaaattgccacgaatcccgatattgatttgatgatcttggatattatgatgccgaatatgagtggtatcgaagtcattaaggcggtccgtaaggattcacaagtgcccattattgtggtgtctgccaagacaactgatatggacaagattcaaggcctcctaaccggtgcagatgactacgtttcaaaaccattcaatccattagaagtgatggcgcgggtgaagtcattgttacggcggagccaacaacaagtggccaacgaagtgccggatgtcttagaagttggtccgcttatcattaagcgcgactcacatgaagtgacgacgattaataacaagcaaatccaactcaccgcacttgaatttgggattttatacttacttgccagtcaccccaaccgggtcttttcagcggacgatatttttgaacgggtctggaaacaagaaagtatcgtctctgccaagacggtcatggtccatgtaagtcatttgcgcgacaaaattgaagaagcaaccgatggtgaaaaagtgattgaaaccgtctggggtgttgggtataaggtagaagtttaatggctgactatcaaggagaaaagaacctgcaaaaagtggcactaaccgctaaggaaaagagcgaactctttgccgagggtatcatcacggttattttgttattactattaaatttatcaatcatggtgctgttacaacaggcgattgtgaataatccgcaactaagcggcggcgtatggatgattaaaaacgccattacaattggtccgaatgaatcgcatatttggagttggcaaaattggtttgtcatcttgatgggggttgccgatgtgttagtcgtctattggcggcttattcggcgttaccatcaaatgcagatgtggcacgtgattggtgagttgcattacattgccgatggtcatttggaccaccggattaatttgcgtgtcaaccgtgatttgcaacgcgtgatcgatagtgtgaacacgctggttgatagtactgtgcgttcaatggaagaagaacgcaagattgaaaagagtaaggacgaattgattaccaatgtcagtcatgatttgcggacgccgctgacttcaatcatcggatatcttggtttaattgaagataatcagtatcaaaccaaggaagaactaaccaaatatacgcataccgctttcgtgaaggcgcaacaaatgaaggtcttagtcgaggatttatttgaatacacgaaggtgcggcaaacatcgacccccattaccaagacaacgtttgatatggagcagatgttagatcaattagcggccagttttgagttagaagcgaataagaaggggatgcagattaatgtaacttgtaatcctgcaccactgatgatggaagccgatactgaaaagcttggtcgagtcttcaataatttaattgctaatgctttgaaatatggcaagggtggcaaacaaattacgttggcggctgaaaaaatcggtcaagaggcgattattaaagtgtcaaatgatggtcaacaaattccaagtgattcattgaaccaactctttgaccgcttttatcgcgttgaagcatcgcgttcacaagaaacaggtggcactggacttgggttagcaattacccaaagtattgtcgcgttacatggcggttatatttatgctgattcgacgccagaattaaccagttttgtgatacacttacctttgaagttaggacggcggattgatcctcaaactgctggcgcaaaatcagttaaggagtaatgttgtgtttaaaaaattagtacaatatgtaatggtcggcctattggcaattgcacccgttggcggtcttttgagtgcccagactaccaaagttgcagcggcaagtacgccggtgagtttgccgaccacccctcaaatcgatgcgagtgcagcaattgcgctcgacccagcaactggacaagtcttatacgaacaaaatgcggatcaggcgttgccaatcgcttcgatgacgaagatgattacagcctacatcgtgttagcgcaaattaagcaaggtaagttaacgtgggaacaaacggtgaagcccgatgacctcatttatcaattgagtcaaaataaggatttaacgaatgtgcctctacaagcggacggacaatataccgtcaaggcacttttccaagccatgatggtcgcttcggcgaatgatgcagccatgatgctcgccaaccaagtggccggttcacaaaaggattttgtcgatttaatgcggcaaaaagtggcggattggggcattcaagacgcacaactttattcagtgtccggcttgaacaatgaattcctcggcgctgaagtttatccagacagtccggctgatgctgaaaatgaaatgagtgcggcagatgtcgcactcgtagcgcaaaagttgttggctgattatcctgaaattctcgaaacaaccaagcaagcgcattttacatttggcgcccaaacaagtgatgaaacggccatgtcaacgtggaacttaatgttacctggcgaaaataatgcaccgcaagactacgtggtcgatggtttaaaaaccgggacaacggacaaagcgggcgattgttttaccggaactgcgacgaaagatgggcaacggattctaacagtggtgatgcatgccaatggtgaagatactggccggcggttcattgagaccaacaagctaatgcaatatgtcttcgatggttgggaacaaaaacaattggcacaagccaatcagagtctcgcaccttataagacagcgacggttaaatatggtcgccaaaagacagtgcaattgattacgaacaaagctatttcaatgtgggtgccaaaaggaaccacagcagccaacattgactggcattaccaagcagtcaaaggtggtgcaaaacgccaattggaagcacctattaaaaagaatgtgcaaattggtcaagtgacaccacaattgaacggtgtcactacgcggtatatcggacaagcgccacaatcacaattacgcactaaaacagcggaccccaaagccaatttatttgttttaatcggtgaagggatcaaagaatttttcacgaacctattttagttggaatcaaaacgcgacacttaacggtggcgcgtttttttatggctacgattataagccgtttcaagcgcagcatgattaaatcgtgctataattaaaaccattcacaaggattttgaggaggacgaaaatggctttaacattagatgcatgtacgttaattctaaaagagcatcatttattgaaaagtgtggcgcttaatggtgacccgactttaaatatgaccggcatcgcgtatgattcacggcaggtaactgaggacacgctctttttctgtaaagggaattttcgtcccgtctatttaacaaatgcaaaagaattaggggccgtaacatatgttgccgaacaagcgattgttgaaggcaacgggatgaacgccttaatcgtcacgaacgtccaaaaagcgatggcggttttatcagcggctttttatgattacccacaagatgatttatttatcgtggcttacactgggaccaaaggcaagacaactgcggcctactttactcaatcgattttacaagcgaggacccgtcaaaaaacagcattattttcaacaattgatcgtgtcttagggcctaaaccagaggatcgcttcaaatcgaatttaacgacaccagaaagtttggatttattccgcgacatgcgcaaagcagttgaaaacgggatgacgcacttagtgatggaagtttcgtcacaggcgtataagaaaaaccgagtgtacggcttaacgttcgatgttggcttcttcctaaacatttcgcctgatcacgtcggaccaaatgaacatcctaattttgaagattacttacactgcaaattacaattattggtcaactcacgatactgtgtgattaacgcgcaaacgcaatattttgcggatgtgtatgctgcagcaactacgacgactgctccggaatcaatttacttatttgccgaaacggattatcaacctacaattccggtggcggttgatttccgctttgaaaatctagaaacgggcttagcagaaagtcggtttaaagttaccgcggcttctgaacgagccattcagcttggtgtttctggtgattaccaattgcgtttaattggggatttcaatgaaagtaacgcgacagctgcagtgattggtgccggtttggcaggggcggatttaatcgcagctcaacaagggattcgcgacttgcagattccaggacggatggaaaccttagccgttccaggacatggtcaagtatatgttgattacgcgcataattatgccagcatgaaggcgctcttgagtttcttgcaaaaggaatacaatcaaccacgcctactagttgttgtcggtagtcctggcgataaaggtgtttctagacgtgctgggtttgcgcaagtccttaatgaatatgcagatcgggccattttgacgactgatgatccaggatttgaagatccagcagccattgccgctgaaattttggccgggattgaccaggataaggtgacaaccaccatcgaaattgatcgtccaacagcgattgaacaggcgattacggaaagtaaaccgggcgaaattgttgtcttagcggctaaaggggccgatgcttatcagaaagtacgcggggtcgatacaccatatccaactgatatggtgattgccaagcaagtggctgctaagttaagctaatcagcgtgtttcttaaagatttttaaatcagatgtggatttaattgctattctgaggtgtgtctcgtagaataaagatgaatcaataggagttggaggggttattatgaaaaagatggttacagttagtacagttttggtatcaggactactattattaggggcctgtggtcaaactagtacggcaaatcaagatgctgatgccaagcaaagttcaaccacggctagtctcaaagcacgtgaaagtagtgttgcaaaacgcgaaagtgaactttcaagtagtgcaagccaattaaaagcgagctccaaagcggcgatggcatcttcaactgaagtagagtccccacaagcaagttcatcaactgctacaacggcaagtagcagtagtcaatctgcgagccaatctagcagcagtgcaacaacaacgactaccacgacaccacaacaaacaactgccgtagatggcaaccaagcgattaagttggtggttcaacaagttggctcacaatttggtcaaaccgcatcgtatttgaataatggcttaatcacacgcggtggacaacaaggctatctcattaatatttacgtaccaaacgaagatcaaccacgggcaggttattttgttgtccaagcaacaggtgcagtggaacaaatctggtaattaaagagtgtggcgtaagtcgatgctccgaggattaacacagggcgtgaataattacgcagtaattgtttgcgactcagggttaaccggaggagaatgacttacagaacacgtttaaagttcaacaattcaaaaaaggggttagggcaaaagcaatctttgtcccaatccctttttaagtgttttcagaaaaatgattgacaattagtgagactcgtgtaaaatatttttagtaaaacgtaataattacgatttagaaaagaggagaaaaagatgcgtaaaaaaggtttggaaatcatggcgggaatcttactgctaatgctattagtggctggttgtggtcagagtacgaaaaaggcgagtgggattcaagttgtatcgtcactcgatttttatggtgaggccgcacaagcggttttaggtaatcaaggtcacgtgacgtcgattatcaatagtcccagtttagatccacattcatacgaagcaacaaccaatgatgctaaactcgtggctaaagcggatattgtgattcaaaacgggcttggttacgacagctggttaaacaaagtcgttaagagtgcccaaccagatgaccaaactgtgttgacagtcagtcaattaatgaaacaatctaatggcgctaacgaacatttatggtatgatttaaagacgatgccaacattgaccaagcgattagtgactgaatttagcaagcgcgatccgaaacataaggcaacgtatcagcaaaatggtgcggtgtatcttaaaaagttagcttcgttagacgcacaactccaacaactaaaggcgcaggccaaaggaaaacaagtggctgttagtgaacccgtttttgactatgcattggctgaaatgggttacaaagtcgctaaccaacactttgccaaagcaattgaagatgggaccgatccatcaccaaaagatattacaacgatgcgggatttaattaaaacccatcagattgcctttttagtgattaataagcaagaagaaagtcccattattaaacaaatgcacgaactagcggataaagaaggggtgccagttgtacaagtaactgaaacactacccgctaaaaaaacatatttaacatggatgcaacagcaatttgatgcagttagaaaggctcaggattcaaaatgacagaattagtgaatgcacaacatttagggcttgcctttagtaatcgacaagtactaaaagatctcagttttacgatcaaacgtggtagcatgacgagtttaatcggtccaaacggggttggcaaaacaactttggtgcgcctattaatcggtaatttacaaccgacagaaggacaactcgtttttaacccggataagcaaaagctaaacatcggttatgtgccacagtttagaaatttagaagctgaatatccgttgtccattcgtagttttgtgagtttgaatcaacttgatagccacttaccgtggaaatcgcgcaaggaacgccaagcgcttgatcaaattttagaacagacccatctaaccgcgttgcaaaagacgaccgtggggaatgcttctggtggtgaaaagcaaaaagcgtatttagcccaagcattaatcagtaaaccagacttgttgattttagacgaatcgacagcgagtttggatattgaaactaaagaagaagtgatggccttggttgcagagttgaaccgggaacatggtttgacggttatttttgtgacccacgatttagaattggcccggaaatacacggatcaatacctatttttaaaacgaggtcaatatgaagccggaccaatgagtcagttggatcccaatttggaattagattaaagcggaggataagcgagtgttaacttttgattttatgcggcatgcctttgtcgccagtacttttatcgcaattacctgcggtttaatcggggtatttgttgttgcgcggaacatgtcatttctagcgcataccctatctgaaattggatttgccggagcctcatttggggttttcatgggaattgcaccattgaatgggatgttattgttcacgttactcagttcaatcacgattggtcagatgagtgccaaagaatcacggcgagaagcgtcgattagtgcgatttcaagtctgtttgtcggtttggggattctctttttatccctttcaaaccgaaatgctagttatgctaccaatattttatttggttcgattattggcattagcttagcagatgtttatcaattaatcatcttatctggggcaattatgattgggctgttgatcttttaccggtacttggtatttgattcatatgatccgattggcgctcaagcacaaggtttaaagaccaacttactatcgatttatttcttaattttattagccgtcagtgtcagcattgctgctcagattgtggggtcattactagtattcatcttagttacgattccggcgttcattgctaaatatttagcgaagagcgtacccgggatgttggcaatctcggttgccgcagcgttattaggggtttggctcggtttatggcttggttatctaacgaactggccagtgaccttcttcatcgccacgattgagtttggcttttactttattgcattgttatatcatcgacgaattagccgttaaaaaaacgtcctcaatcattgagggcgttttttcatgaggcttaatttaggttagcaagtagggcttcgagttgatccagacgttcttcgaaaactgcaaaagcgcgttcgagatagtcggcactcgtcatatcgacgccggcttgttgcataatttcaattgggtaggcggagctcccagcttttaggtagtctaaatagtgatcgagagcaccgggctgtttggtgctaatgccgttagtgagagtcgttgcagcagcaaagccggttgcgtattggtaaacataatagttcatatagaaatgtggaatccgagtccattcaagggcgatctgtggatcgttaacgacggcaggtccgtagtagcggctattaatgtccgcatattgttgtgacatgaactcggcagttagtggctgaccattggcagcggcagcatgcatcgcatgttcgaactcagcgaattgcgtttgacggaaaacagtgcctttaaaaccatccaaatagtagttcaatagataggcctggaccttaggatcagactgtgtttgcaataaatattccgttaagagattttcattggttgttgacgcaatttcggccacgaaaattggatagtcgccataaacataatcttgggtctgacgggtgaaggcgctgtggacactatgccccgtttcatggaccaatgtgtataagttgtttaaatcatcttgccagtttaataaaatgaagggattggtgtcataagcgccgccagaataggcgccactccgtttcccttggttttcacaaacatcgattaagcggtcatcaaaaatatgggcaacttgtttggcataatcgggtcctaggatcgacaatgcttctttggcagttgcttgcgcctgctcataagtgtaggttaatgcgggttttcctagaagtggtgtgtagagatcaaacatgtgtaattcagataaattaagttgctttttgcgtaattcagtatagcgatgtaaaagtggtaagtgttggttcacttgatcaaccaaggttgtatagacggcttctggaattgctttgggtgctagcgctgcttggcgtgcactatcgtagtgatggacttgagctaagtaattatgacctttgatttcagtggcaagcgtcgtcgcaaatgtatttttgaattgaccataagttttgtaaagtgcttcgaaggctgcttggcggactgatcggttggttgattgtaaaagttggctgtagaccccatctgaaagctgcaacgtttgtccgttttcgtcagtcacttctgggaattgtaaatccgagttgtctaagacgctgaaggtttgactagcagcactgaagatatctccggcagcagctaacaaggcttcttcttgcccagataagacatggtctcgactatcggtaatggtttgaatgaaatggctgtaaactgctaaattaggcgtcttggtaagccaatctgctaattgcccagccggaatagcaagaatcgcaggctctaaaaaggccgctgctgctgaaacttcggccgctaagctgtccacttgggcttgatagccttgataagttgcgttagcagtatcctgatcatttttcatgctagcataaacgtaaattgtttcgagctggcggaaagtggctaagatttgttcgattgtagcgactaattgatcagccgattcaaacggacgatcaagtgttttgagtgtgggtaattgcgttttaactttcttaaaggctacttcaaaagctgcatcatttttgaaaatcgtggttaagtcccatgtgagcttttctggaacagcatcgcggatggggagttgttgagttgacatatgaaacctccataattaagactaattgcttacattttagcataaaagcgcttaggaaagtgttgttcaacaattgaaggaattattaaaattgtgtaacttttcttaaaaggcgttgtttgaaatgataattccgctataatagcaacataacattattaatgccggtatgatacataatagaagggaaacacctatgcagaattctaaatttttcggatctcgagaagcaaactacaaaaaagttaaaaagcatcgcacgatgaaagttttgatactcattctaacgctagtcctcttcggtggcggcgcgtatgcattacgcatcagtaatcaagtgaagtctgcagcgaataaaatttataaaccaaatacgactaaaaaagccgctaaaacgattaaacataaaaaaccattctctattttattactcggagtggatactggtgctgagggccgggtggataaagggaattccgatacaatgattgtggcgacggtcaacccagataaagagcaggtcaagttggtcagcattcctcgggatacgctagtgcagttacaaggcgcagatgaatttaacatgcagaagattaatgctgcctataatgttggtggttctgatatggcgatgtcgacggttgaaaagatgttcgatgtcccaattgattactatgtcacggttaacatggggggcttatcgaagattgttgacgctgtcggtggcgttgatgttgacgtaccatttacgttcgaatggaacgggagcgagtttactaagggcaagatgcatctgaaaggaaaagccgctttagactactcacgaatgcgttacgatgatccagaaggcgattatggccgtcaaaaacggcaaaaacaagttatcacgtcgatgattaattctgcagtctcgcttaaatctttgaccaactttgaatctatcttagactccttgtcagatagtgttgccactaacctcagttttgatgacatggtagcgattcaagcaaattatcgaaaggcagctaaatcaattgagtctgatgttttaactggacgtaatgctgatattgatggtagctcgtatcagattccaaccaatgaagaaatccaacgcgtttcagatgtcttgagaacgtcactgggattagaaaaaacaacgattaacaacgcagaaaccaaacaaaatgatttgaacacgtattttacaggtgaagaaaatcatcaagagtttacggtttattctgaaagtgtcatgaatggtggaaagagtgctgcaacgacgacgcaaagtaactatggctactcgaacagtgcaacttatagtggtaacaacgattacagtaacacgaccaatacttggcaaatgcaacagtctacaaatctgtggaatgcgggctattaaaaatgaatggaaaagcggtcctttgcaaaaggggaccgctttttttgtggactaatttagttgcgtttaacaagtgattatttatgcaattagggggtgaacaatagtttacatttacaagggggaacggtattatttaaagcggtacgaaaaagacaaatgaaggatgtggcgtgtcgtgtatttgcttgtaaatgttgttggattactgatttttattggagtcggctttctgttctcaaagaaaaagaaagaaatcgattggcgctccgtcttaatcatgttagtgattaacttagtgcttgcttggtttttaacgagtttttcaatcgggcgggatattgttttaggtgcagcaaacggctttaactggttagtgcaagttgcctatactgggattgcttttgcactaccaagttgggtcaatgtgaaacaaatggatttcgttgctagcgtgttattaccaatcttgatgattatcccattattcgatatcttaacgtatatcggggtcttgccttgggtgattaaatggttaggccgtgggttagctaagattacgggacaaccaaagtttgaatcattctttgcagttgaaatgatgtttttaggcaataccgaagcattagctgtttcaagcttacaattgaaacaaatgaaaggagaacgaacattaacacttgcgatgatgtcaatgagctgtgtgacagcttccatcatcggcgcatatacacaaatgatgccgggccaatttattttaacggcgattccggtcaacattattaacgctattattgtcaccaatattttaaacccagtgaaagtcacacccgaagaagatacgattgctaaaatgggtgggagtggttccgcagctgttgaagcaaccgaaatggttgaaggcaaagtggaacgtgaaccattcttctcattcttaggtgattcaatcttaaatgctggtaaattagttttaattatcacggcaaacgtcatcgcctttgttgcgttggctgccttgatcgacaaggtgcttcaattagtgaacccttggattacccttgaacatttacttggaatcgtgatgttcccattcgcatggttaatgggacttgatgtgcaccacgcttttgaatttgcacaattcatggggacgaagttggtgaccaacgaattcgttgtcatgggtaaagtccaacattcaatcgggagcttcgcaccacattaccaagctgtcttaacggtcttcgtgacatcatttgccaacttctcaacagtcggcatgatcatcggcgccttcaaaggccttgtggaccgtgaaaagaacgacatgattgccaaaaacgtcggctacatgttgctatcaggaatcttagtatcacttctttcagcagcaacagtcggactatttgtatggtaatttaaagagtgcgcaggcagtcggttatcttctgaggattagcctaatcaggcggattaccgacaaagtcggtgatttgactgatgtagctaaccggaagaagatggctgccaaagcacgtttagagtgcgtttgatgacggttaacaactgagcattaatacaaaattcccaataatccgggtttttaggattattgggaattttagattaagcggaaattgttgtcatcaaaagcacgtttagagtgtgtcattaacgggttgcttttgaacacttgtctagtgttgtgaataatcagcacagctgattgtttgcaatacgtagcaaaacgcagaaagcagttaatgaaagcacgtttcaattcaatcaatttacggcaccaacttaatcttggtgccgcattattgggctatggccaagcggtaaggcaacaggttttgatcctgtcatgcgctggttcgaatccagctagctcaatccaactgcaaaacttgacggttaaagggctttgtgatatattttggacattataataaaatgtagccatcgataaagtacttggttttagcgatcaatcacagagagagtaaccccgttgaaagttacttattgattccagttgacagcttttgaggcttggatgaatatcccgctagcagatagcgttatcaacagctgaaattaaaggtggtaccgtgcgcaaagcacccttgtcgaaagacgagggtgctttttttattttttataaaatgtagattcagagaggattggcaaatatgagaacaagaacaacatattgtggattagttggggaagaatttctcaaccaagaagtcgtattacatggttgggttcaaagccaacggaattttgggaacttaattttcgttgatttaagagatcgcgaaggcatcgttcaattggtgtttaatcaagacacagatgcagatattttccaagtagcaagtaaattaaagagtgaatatgtcgttgaagtccaaggaacagtgatggcgcgtgatgaagcggccattaatccagacgtgaagacggggaaaatcgaagtgattgttaaagacttagtggtcttgaacaaagctgaaaccctcccatttgaaatttcagataacaatacggcttctgaagatttgaaattgaagtatcgttatttggatcttagaagaccagaaatgcaaaatgccattaaaacacgggctgcgattactcgtgcagttcacagctattatgataacaatggttatttaaatatcgaaacaccgaacttgacgagttcaacacctgaaggcgcacgcgattatttggtgccttcacgggtttatccaggtagtttctacgcattaccgcaatcaccacaactcttcaaacaattattgatgtcagccggctttgataagtactatcaaattgcccgttgttttagagacgaagatttacgtggggatcgccaaccagaatttacacaaatcgatgttgaaacaacgttcttatcagacgttgaaattcaaaccgaaacagaaggtttattgaaaaaagttatgaaagacgtcaagggcatcgatgtgcaaacaccattcccacgtttgaaatggcaagatgcaatggacaagtatggttcagataaaccggatgttcgttttgatatgcaaattcaagatattacagaaatcgtgcaagattctgacttcaagccattctctgaagctgttgaagcaggccaatatgtgcgcgcaatcgtcgttaataatgccgcccctaaatattcacggaaagcgttagacgaacaacaacaatacattgaacgttacggcgctaagtcattgttgtgggcgaaatacgctggtgataaattatcaggggcttctgctaaaggcttattaccttaccaagaagcgcttgttgaacgtttgaacttaatggatgatgatttaattttaatcgttgccggtaacttccacgtggtttgtgatagcttaggttacttacgaacacacttcgctaaagaaatggatatgattgataagagccaatttgcatttacatgggttgttgattggccattatttgaatatgatgaaggctttggcaaatggattgcagcccaccatccattcacgcgtccacgtgatgaagatattccattgttggatactgatccacataaggcacatgcaatttcatacgatatcatcttgaatggttatgaattaggtggcggttcactccgtatttttgatccagaagtccaagaaaaaatgttatctgttttaggggttgcccctgaagtggctcaagaacgtttcggccacttattaaatgccatgaaattcggtttcccaccatcaggcggcttagcgattggtttggatcgtttcgcaatgttgctcgctagtcgcgacaatattcgtgacgtgattgccttccctaaaaattcccgggccacagaaccaatgaccaatgcgcctagtgaagtgacaccggaacaattagaagaattaggtatcgaagtgaggcctcaaaagaaggactaaccagcatcaaatgaagtcaattaagtaaaggagaattgccatggaagaaatgtttacgattttaggcggcatggggacggcggcaaccgaaactttcgtacatctaatcgatgaattaacaccggctaagaaggatcaagattatctgaattacgtcgtgttcaaccacgctgaaattccagatcgcacagcctacgtcctcgacaacagccaagaaaatccgttgcccgtgatgttaaaagatattcgccaaatgaatttgttagcgccgaagttcatggtaatgacctgtaacacagcccattacttctacgacgaattacaagctgccgcagatttcgacattatccacatgccacgggaaacggtcaaacacatgcaacaaacaattcccggcttgaagaaaatcggtgttctcagcacaaccggaacccgacaagccggtatttatcaaaaagcaattgctgcttttggtcttgaaagtgttgttcccgaccaaacattgcaagatgccacgatgagtttgatttatgatgacattaaggcgactgggacattcagccatgacaagtatcaaaaaattgtcgatacaatgttaaatgactatgattgtgacgcggttattttgggctgtaccgaattgagtgttgcacagtcggagtttccattgtatcccgacaaagtgattgatccgatgacagtggtcggccaaaatattgtcgacgggctatacaacaagtagcaattactaattaagttttaacaaagagcatcctgagctgacgtatattgaacggcagtctggtatactacgataaatattgatatagaaggtgacagcatgcaagcaaacggtaaaaacttcacccccattttattggggagcgattttaacgtttacgggatggcccgttcgttttatgagatgtatcatgaacctgttaaggcctacgcaagtcaggaattagcaccaactcggtttacaaaaatcgtcgatttagaattgattccaggcttcagtgaagatcctggattcattactgaaatgctaaaattaaaggaaatctatcgcgatagcgatggcccagtcattttgattggctgtggtgatggctatgcgagcttaatttcacaacataaagcggaattggaagatgtctttgtttgtccatatattgatcacgatttactagaaaagttgacttataaggaaaccttctatgaaatctgtgacaaatatgacttaccttatcccaagacgcacatcattaccaagcaaatggttgaagataatcaggtggaacaacctttccaatatccagtggcgttaaaaccggcggattctgtggaatggcttgatgtgcattttgaagggcgcaaaaaagctttcacgattaaaagtgaagctgaattccaagacatcatgcgaaaagtatatgaaaatggctaccaatcagacatgattttacaagacttcattcctggggatgacagtcggatgcacgtgatgaacatctatgttgaccaacaacatcacgtgaagatgatgtgtctgggccatccattattggaagatccagcacccgcagctattgggaattacgtggcgattttgccggaatacaacgcacaaatttatcaacaagtccaaaaattccttgaagatatcgagtttacgggttatgccaacctcgatatgaaatatgatgaacgcgataacacctacaagttattcgacatcaatttacggatgggccgcagtagtttctttgttaccttgaacggctataacttagcccaatgggtggtgcgcgattacgtgacaaacgacttgcaagatgaacctgttgtttgggcgaataaagatgaagacagtcccgcactttggttgggcgtttcagtggatgtctttaagaaatatgcccgcaataatgccgaaaaagacaaggcattggctctcatcaaacaaaaacgttacggcaccacttttgaatatagcaaagatatgaatctcaaacgctggctattgattaaatggatgttgcacaattaccgcaaaaatttcgcgaagttcttcaaagaaaataaggaataacgtcgcttaaaactttaaaaagcacatcatcgttgaacgatgatgtgcttttttagcaacattagaaaaaatcccgccgcagggttgcaggtttgtggtaaatgatgcaatatgaagttggagaatcgctgtggcatttatggtttgatttttgaatgagtgctttatttttgagacaaaaacgatataataaatcaaacaataaatttacaatgctagccgttattttgactgtcaattagcgttaaagtgcttttagatgcgattatgaatgtagcaagtaattgaaaaaggtggaaaaacgatgcactcattggatattgagcgattaaaagagatgtcaaactttgaagttgccgctttgttcttagaaaattcagaaaaaaatacaatgcataatgcaccaattaatgttggtcgtggggaccctaactggattaatacgcgggcgcgattagcttttaataagcttgtcgaatttggcgtcgaagaatctgctaagaaaattaacgaggctgatggagatatggcgggctacgttgataaagcagggattgcacaacggctgcatgcctaccttgatgccagtcataaaacagatcgatttatattagcctttttagattataccgaaaagcacatgggcctcaatcaggatgatttggttcacgaatttgtcgacggtgcgattggcaatcactatccagtaccttcgagaagtttaatcaatgtggaaaaaatcctaaataaataccttgaagtgtcactatataatggtgaaaaattagctaatcaaacggatgtcttcccaacagagggcggaacagccgcaatggtttatttgttcaaggaattgaagatcagccatatcttacggcctggcgacacgattgccatcaataccccaatctttaccccttatttgcaaatcccagaattaagtgaatataaattaaagcaattcgatgtgagttccgttgaagatgacaactggcaaatgatggacgccaagtttgaagaattgaaggacccgataatcaaagccttttttgtggttaatccaacgaaccccacttcgcgggctttcagcaaacacgcgttagctaagattaaagaggtcgttgaagcaaacccagaaattatcatcattacggatgatgtttatgggacttttgtgaatgatttccaaacaatttactcaattgccccccgaaatacgatgttagtttattcgtattcaaaactttatggggcaactgggcatcgtttaggcttactagcagtgcaccaagataatgtttttgatgaaattattgctaagcgaacggctgaagaaccagcgattaaggcagcttttgaaaaacggtactcagttgtggcgcctaatccgcttgcgatgaaattcattgatcgaacagtggctgacagtcgtgaaatcgcgttgtaccacaccgcgggattatcaacaccacaacaaattttgatggcactatttagtttgaccagcttaattcacgaaggtgaaaaggatccatacatcgaagcttccaagaaaatggttgatgcgcgatacaacgctttttgggaatcgatgggcatggaatgtgatcactctaaagaaaacgctgaatattatgcggtatttaacatctatgattttgctgaaagaaagtatgggcatgaattccacgactatttcgaaaagcacgtgagctatcttgatttcgaagataaacttgcagctaaatacggcgttgttgtgatggatggggcaggaatggggactgatgatggctacttgcggatttcattagctaaccaacccgctgaaaattatgccattactgggaaccggattgcccaattactagcagaatactatactcaatttcaagcacattaaataaaaagtaggcgctgtgaagcattttttgcaagatagtctgatctggagcgcgcgaggtgctgaggcaataaacattgtctcagcacctctttttttattggcctgcattaataattgaacatttatcgagtctgtttgtagacgacttttaggaatcatgtataataagcttgagataaaatgatttataaaggagtttagcatggccgacttagtttatcagaatattatcgcggacttaaaaaaagcgattaacgcagaatcatttcccagcatgaaattacccgatgaacggacgttgactgaacactatcaagtgagtcgtagctcggtcaaacgtgcgttaaacattatggctaatcaagggatcattttcaaaaaacggggttcaggaacctttattaatccactttatttaaagggtggctcgttttttaattacaatggctctaacctaggggttaccgacagttttaaagccggtaatcggacaccggggattaaattattagatttccaagtcatcaagccgagcgcggaattgcaacgggacttgttcctgaaaccagatgattttgtttacgaaatcaagcgtctccggttgtttgatgatgaaccgttcatgattgaaacgggcttcattccgattaaggtaatgcccgaattgaccgaaaaaattgtatcgagttcaatctttaactacttggaaaccgagaaaaatcaagaagtcacacgcgctttcctgtcaattttcgcggaaccatcaactgatgatgatcaagcgcacttaaagttgaaatcgacggaaccagttggcatcatggaaggaattttcttcttagacgatgggacaccgtttgaattttcaacgatgcgcctacactatcaatacatgaaatataatacattcgttacggttagcggtcgcgaatagggccgctatttttagattcaaaaaattggtacgacccaatattaaaaatggttgacttttttaaaaagtttagtatgataagagagtggtcagaaacaacaaagttgcaaaagctgcgactggaacttaaagtaaagctattaggaacttttttaaaattaaaaaggggtgctattaaaatgacagattattcaagcaaagaataccttgctaaagttgacgcattttggcgggctgcaaattatatctcagttggtcaattatacttaaaagataacccactattgaaacgtcctttggaagcaaaagatgttaaggcaaaaccaattggtcactgggggacaatctcaggccaaaacttcctatatgctcatttaaaccgcgcaattaataaatataacttaaacatgttctacgttgaaggcccaggtcacggtggtcaagtgatggtctcaaactcatatttagatggtagctattcagaaatctatccagaaatttctcaagatgttgaagggatgaagaaattattcaaacaattctcattcccaggcggcgttgcttctcatgcggctcctgaaacacctggttcaatccatgaaggtggcgaacttggttattcattatcacacggtgttggtgcgattttagataacccagacgtgattgctgctgttgttgtgggtgatggggaagctgaaactggcccattagctgcatcatggttatcaagcacattcatcaatcctaagaatgatggtgctgtcttaccaatcttgaacttaaacggtttcaagatttctaacccaacaattctttcacgcaagagtgatgaagaattaacgaaatacttcgaaggcaatggttgggaaccaatctttgttgaaggcgacgaccctgaaaagatgcacccagcaactgctgctgcaatggatgaagccatcgaaaaaatccaagcaattcaaaagaatgcgcgtgaaaacggcgattcatctcgtccagtatggccaatgatcgtcttccgcgcacctaagggttggactggtcctaagacatgggatggcgtaccaatcgaaaattcattccgtgcgcaccaaattccagtgccaattgacagtgctgacatgcaacatgttgatgcattagtagattggatgaaatcataccgtccagaagaattgtttacagaagcaggtcaattaaaacctgaaatcgcagaaattgcacctaaaggcgatcaacggatggctgctaacccaatcaccaatggtgggattgatcctaaaccattacgcttaccagattaccgtgattatgctgtggataattcagaacacggtaaagtcgttgcgcaagacatgattgttttaggcgaatatgttcgtgatatcatcaaagacaacgatcaaaataaaaacttcagaatcttcggccctgatgaaacaatgtcaaaccgtttgaaccatatttttgaagcaacaaaccgtcaatggatggaaccaatcaaagaaccaaacgatcaatacatggcaacagaaggccgtgttcttgattcacaattatcagaacatcaagctgaaggttggttagaaggttatgtcctaactggtcgtcatggtttctttgcaagttacgaatcattcttgcgcgttgtggattcaatgttaacacaacacttcaagtggttacgtaaggctgatgaacaagcatggcgtaacaagtatccttcattgaacgtgattgccacatcaactgttttccaacaagatcacaatggttacacacatcaagatccaggtatcttaacacacttagctgaaaagaaacctgaattcattcgtgaatacttacctgctgatgctaacacgttgttagcaacaatggatactgtcttcaagagccaagaaaagatcaatttagtggttgcttcaaaacacccacgtcaacaatggttctcaattgacgaagcaacagtcttagttaagaatggtttgaagattattgactgggcaagtacagaccaagatgctgaaccagatgttgtgattgcagctgctgggacagaaccaacacttgaaagtttggctgcaatctcaatcttgcacaaacaatatcctgacatgaagattcgtttcattaacgttgttgatttattgaaacttcgttcacctaaagtggaccctcgtggtttaacagatgaagaattcgacatgtactttacaaaagacaaaccagtggtcttcgcattccatggtttcgaaggcttagtacgtgatatcttctttgaccgtcacaaccataaccttcatgttcatggctaccgtgaaaatggtgatattacaacaccattcgacatgcgtgtcttgaatcaaatggatcgtttcagtctatctaaagaagttgcagttgacgtacttggcgatcaagctggtcaattcgcacaatcaatggatgacatggttgctaaacacaatcaatacattcgcaatgaaggtactgatttaccagaagttgaagaatggcaatggacaccactccgttaatgcggtgagagtgcgtcactaacggtttgcttttaagcatttgcctaatcaggcggattgccggtaaagccggtgatgtgactgatgtagcaaggcgcaggaggcagttagtgtaagcacgtttaagtggaagagtgcgtttgaactggttatcttctgagcattaactggatttgacgaattgacgatgtaatcgtcgatttggcaaatttggttaagcgcaggaagatggttcaaaaagcacgtttaaatgatagaattctactatcagaagaagggtctgggacaaacatacttttgtcctagattctttttttgtggattagtggtctctgagcctttatttttaggcataataacggtaaactagtagacaagtataattttagaaagaggcgttttttttatggcaaaaaataaaatccgagtgcggtatgcgccaagtccaacaggtcatttgcacatcgggaatgctcgtacagcattatttaactatttatttgcacgtcacaacaaagggactttcgtgattcggattgaagatactgacacgaaaagaaacattgctgacggtgaaaacagtcagttagataatttgaagtggctaggtatggattgggatgaaggtccagataagcctggtgactttggtccttatcgtcaatcagaacgtcgcgaaatttacacgcctttaattgaagagttagtggctaagggattagcttacgaatcatacaaaacagaagatgaattaactgaagaacgggaagcccaaaaagcagctggcgaagcaccacgttacatctacgaatacgaaggtatgagtgatgatgaaattaaggctagccaagaagctgctaaagcaaagggcttacaaccagttgttcgtttacgtcttcctaaggatcacgtttacaagtttgatgacattgttaaaggtgaaatcagctttgaatcagatcgtttaggtggcgactttgtcatcatgaaacgcgatgggatgccaacatataactttgccgttgtcgttgatgatcacttgatggaaatcacccatgtcttgcgtggggacgatcatatcgccaacacgccaaaacaattggctgtctacgaagcctttggttgggaaccaccagtctttggccacatgacattgatcatcaatactgaaacaggtaagaagttaagtaaacgtgatgaatcagtgcttcaatttatcgaacaataccgcgaattgggttacttaccagaagcgatgtttaactttatcgccctattaggttggtcaccagttggcgaaagcgaattgttcaatcgccaagaattcatcaaacaatttgatccaaaacgtttgagcaaatcaccagctagtttcgatcaaaagaaactcgaatgggtgaataaccaatacgttaaacaatcagatccaaacaaaatcatggatctttcgttagaaagcttgattaaagcgggtaaaatcgctgaaaatcctgatagcaaaatgatcgaatgggcccgtcatttgattgcgttataccaagatcaaatgagctacacagctcaaatcgttgaaatgtcagatgtcttctttgaagagcctgaacaattagacgccgaagcgcttgaagaattaaataacgaaacagcatccgttgttttgaaggaattcagcgaacgcttgaaagatttaacattattcacagcaccacggattatgcaaatcattaaaggcatccaaaaagatacgaagattaaaggccgtcaattgtacatgccaattcggattgcaacgactcgcgaaatgcatggtccatcattacctgattcaatcgaattgttaggtaaagaccgtgtcctagcccaccttgaaaagacattagcagaaattaaataaagtacgtttgaaacgggtagcttctgagcattaacaggatttgacgaattaccgatgcaatcggcgatttggcaaatttggttaagcgcaggaagctgtttaaaaaagcacgtttaagaatagagtgcgtttggttgcgttcagcaactaagcattaataaaaattggtagttatccagaattcaggatgactaccaattttttattaagcggaagttggtgcaaccaaaaagcacgtttagatgttcaaaatagaacagcaaaaaagctgaggttgaagtatttcttcaacctcagcttttttatttttgtctagtccgatcaatttcagtccgaatggctttgaaactttgttctgtttgtgggccattattaacggcgaccatcataaacagactatcgacgatgctgatttgtgcaattaacgcgtgtagtgcttcggcgcggtaattggtttcttcggaaatggacaacagtgtcacatcacccaatttagcgagggttgaattgccaaaactggtgatgacaatcagtggaacgtgacgttcttttaagatgcgtgcaatttctaaagcatctttattttgaccactatgtgaaataatcagcgcacagtcttgttcggtgagttgggtggcctgcatcaattgtagatggtagtcttggctgtaaacagttggaatcgcagttcgtaaaaatttgtggtagccatcttgagcgacgattccagaagcgcccaagccaaataaacttaagcgcttggcctggttgatataatcaacggcttgccgtaattgcgcttcagtcagtagtgaacgagttgctttgagcgcattagtattggatgcgaaaattttatcggccatggtcagatagtcatcattattactaatttcatggaagagtggattatctgttggggttgcttgtttagcaagtaacgccattttgagtgcctggaagtttgcgaaggtcaacattttggcgaaacgggaaatagtggctgttgaaacaccacagtcagccgcaaattcttgaatcgttaaactttgattgaaatgttcagtttttaagatgtaatctgcgatttgtttgtatttttcacttaaattcgtgtagtacgcacggagtaaggaatcgatgttttgtgtcattgaagtgcccccctgttatcgatagtatagcataaaaaacaacaaagaaaattattttctcaaaaagggttgattaaagaaaataatttacatataataaagacattaataaaagtgacatgaaattgtggataaggggactggcaaagatgaaattagcaatgattggtttaggcaaaatggggattaacttggtcgctaacttacgacgtaatgggcacgaggttgtcgcctttgacttaaatgaagcagcggttcaagaagcaacccgcttaggtgcattacctgcaaaggatattgatgatgtggtggcacaattgccacaacctaaaattgtgtggagcatgttacctgctggtaagccaacacaagccacaatcgaaacgttaagtaccaaattgacagccggtgacattgtcattgatggtggtaattcatttttcgaagattctaaacaacacaatgcattgcttgccgcaaaagggattcatttcttcgatgtcggaacttctggtgggatgagcggtgctaacgcagacggaaacttcatgatcggcggtgacagcgcggaagtcttcaaacagattgaaccgatttttaaagatattgctcaaaaagatggctatctctataccgggaaggctggtagtggccattatctcaaaatggtgcataatggaattgaatacggcatgatgcaatctatcgctgaaggattcgatgtgttatcacatggtgagtttgaatatgataacgaagcggttgctaaggtttggagtaatggttctgtgattcgcggctggttgatggaattagcggaatctgcttttgcaaaagaccctaacttagaaggcttaaaaggtatcatgcactcatcaggtgaaggaaaatggacattagatgaagccttgaaattacaagtcccaacaccggtcattggtttatcattgatgatgcggtatcgttcacttgaagatgatacattcactggtaaagttgtcgctgctttacgaaatgaattcggcggccatgcagttgataagaaataagtggtatcctagtaagtagtcagtaaacaccacataaacgaggtaattatgatgaaatatatgattggtgcggatattggaacaacaagtacgaaagcggttttatatgatttaaaagggaatgttaaagcttacgcaaacgttggttatcctttatatcaaaccgtacccgatatggcagaagaagatccggatgaaatttttaatgcagtgttagaagtattacgacaggtgatgcgcaagggcaacgttcaagccggcgaattacagggcgttagtttctcggctgcgatgcacagcttgattctgatggatgcaaatgatcaaccgttaactcgggcaattacttgggcggataatagagctgctaaagcaagtcaacaattgaaagaaaatgggttgggccaagccatttatcaacacactggcacaccaatccatccgatggcgccactttcaaaactgatttggctgaaagaagcgcaacccgaattgttcaaccaagctagtcaattcatcgatattaaaacgtatgtcttccaaaaacttttccatacgtatcaaatggattattcaatcgcttcagcaaccggcttgttcaacatttttaatttagattgggatcaacaagcccttgaagtggctggtgtcacacgccaacaactacctgaattagtcgaaccaacggattatgttaaagggattgacccgatctatggtgaattaaccggcattggtgctgaagtgccatttatctttggcgccagcgatggggttttatcaaaccttggggtaaatgcaattgatccaggcgtagtcgccgttactatcgggacaagcggtgccgtgcgagtggttgttgatcatccagtggttgatccaaacggtaaattattctgttacgccttaaccaaggataaatgggtggtcggtggaccggtcaataacgggggaattgtcttccgttgggtgcgcgatcaactttttgcacctgaaaaaatcacggctgaacaaatgcatgtttcaacatacgatattttgacacaaattgcggcagaaattccggctggttcagatggactcttattccatccttacttgggtggcgaacgggcaccaatctgggatgcagatgcacgtggatcatacttcggtttgacgcggcaacatacgcgggcgcacatggtgcgtgcagcgcttgaaggcatcgtttataacttatacatggtgatgctgatgattgaaggtgtggcaggtaaaccaaagagtattcaggcaacgggtggcttctcccgttcagaattatggcgccaaatgttggcggatgtctttgaacaagacgtcacgattccagaaagtttcgaaagctcatgtttaggtgctgctgtcttagggatgtatagtttaggcttagtggatgatctatcagctgtcaaagaaatggttggtgtgacgaatgtgcatcatccagaagaagccaactttgaagtttatcgcgaactattaccaatctggattcgcttaacacgggaattaaatacggaatacggcgcaattgctgacttccaacgcaaacatatgcaagttaaagagtaacgaagtgaactgggtctgaaagcccagttacttttaacaatattatgatagcgcaaacattattgaaaatagggaaaattatggcattagtagtcctattattgggcattatcttattactcgcccttattattcgatttaagatcaatacgtttatcgctttagttataacggcaatggccgttggggttggcctaggtatgccattaacggacattgcaaccagtgttcaaaacgggattggcggtcaacttggtgagctctcaattgtctttggctttggtgccatgatggggcggttagttgccgacgctggtggcgcgtttagaatcgcgcataccttaatcgatatgttcggtaaaaaagacttcaaattgcaattatgttggcttcgttcatcattgggattgccttattctttgaagttgggatggtcttgttagtaccaatcgttttcgcgattgcaatcgaagcaagtgtgtcaattttgtaccttggaattccgatggctgcagcactttctgtcacacatgggttcttgccaccccatccagcaccaacagcaattacctcagctttaggggcaaatgctggtcacgtattgttatatggggtcttaattgcgatcccttcagtgattattgccggtccattattcactaagattgcaaaacgcttagtaccagatgcgttcgcgcgccaaggtaatctgacggcacttgggcctcagaaaacctttaaattagacgaaacaccggggtttggaattagtgtcataacctcattattcccagtcattttgatggctgtcaccacgatttatcaaatggcctttaacggcgggaaattacctaaaaatccaacgatgctggattcaatcgtcgattttatcgggacaccagccattgcaatgaccatttcattgatggttgcgacgtatacgatgggttgggcgcgtcggattaaaaccctagcgattatgaagacgattgaagaagtcgttaaatcaatcgcgatgtcactcctagtcattggtgggggtggtgcgtttaaacaaatcctcatcgacggtggggttggcgatagtgtcactaaattattcgcaaatgccaatttatcaccactattattaggttggttaatcgcagttgtcttacgggtggcattgggttcagcaactgttgcgtcattgacggcggcaggcttggtcttaccactaatgcaatcagccggtgtgaaccctgcactgatggtcctttcaattggagccggcagtttagcggcttcccacgtgaatgatgccgggttctggatgttcaaggaatactttgatttaagtctcaaagaaacccttgcaacttggacagttttggaaacattgatttcgattgttgggttaattggcgttttactattaagtttagtcgtctaaataaaagttaaatgacgttggctgttaaagacagtcaacgtcatttttaatagcacttaaggtgggcaattatttgtaatcggttacctaaaaaaacgctgagaaacagcttttttttaatcttgttcagggacaacatcaaagagatatgatagaatgggtaaggattaatttgaacactggagacgatcagagttaggtcatcctaaaatcaaagtcattgaatcctaatagttgaacgactcaatcgaagagaaagaggtacttatatggataagaagcagcgagaagattcacaaaagggtgaacttaatcaacaaaagcatgagaaattcatacactatgctgatggcacgagtcttgaagaaattaataacacggttgcgattcccaagaacgctggtttttggcggacgttgatggcctttatgggacctggtgcgttagtggccgttggttatatggatccagggaactggatcacgtcaatcgccggtggtgcgcaatacgcatacaccttgatcagtgtgatcctagtatcaaacttaattgcgatgttattacaagcaatggcagcgcgtttaggaattgtgaccggaatggatttagcgcagatgacgcgggccaaaaccggtaaaaagatggggattttcctctggattgtcaccgaattagcaattatggcgaccgacatcgccgaaattattggttccgcaattgcgttagaactgattttcaacatcccattgctctggggtgtcttaattaccgcatttgacgtcttgctattattactattaatgaaacttggtttccggaagatcgaagcgattgtcgcaaccttggtggccgttattttattcgttttcttatacgaagtgattctagcgcaaccaaatatgggcgacgtaatgcgcggatttgtaccaagtacacggattgttaccaaccagaagatgctattcttggcattagggattgtcggggcaactgttatgccgcataatctctacttgcattcgtcaatcgcacaagcacgtcaatatgaccgtgacgattacgccgaaaagaagaaagcaatcaagtttacagtcattgattcaaacattcaattatcagtcgcatttatcgttaactgtttactcttagttttaggggcagcaatgttctttggaactaacagtgatttaggacgattcgttgacttattcaatgctttacaaaacaaagaaattgttgggagcattgctagcccaatgttgagtttactctttgccgttgctttattagcttctggtcaaaattcaaccatcacagggacactttcaggacaaatcgtcatggaaggtttcgttcgcatgaagattccattgtgggcacgacgggtgattacccgtgggttatcaatcttacctgttattattttcacggtttactaccatgggaacgaagcacaagttgaaaacctcttgatttactcacaagtcttcttgagtgttgcattgccagtctcgatgattccattgacaatgttcacgagcgatgaaaaaatcatgggcccattcgttaaccgcccttgggtgaaatatacggcatggtttgtcacaattgtgttgacgcttttaaatatctatttgattctacaaacaatcggcctagttggctaatgaataggtgctcgttaatccgtaaattgatatggattgacgagcgctttttttgttcggtatgctagactagagataaggtattatttgggagggattttattgtttgaagtaacgagtgtgcatatcattattcgactgctactggcaaccttaattgctgggattatcggatctgatcgggaatataagaaccgcccagccggaatgcggacacacattctggtctgcattggtgcgtgtgtgattgcgatgattcagcaggaaatcgcagcgcaaaacgttcaatttgcattagcgcatagtgcgattagtaccactattcgttctgatcaagcgcggctgattgcacaagttgtcagtgggattggttttttaggagctggaacgattattgtcacccgccacaagattcaaggattgacgacggcggcctcactttgggctactgcgggattaggacttgcaattgggatgggctactatcaaattgcggtgatcagtgcggtctttgtcattttcgtgattgtcttcttgaaaaagattattcacatcaatacgttgaaaaaaatcgaaattaagtataagcataaattggaaaccaaggagtttattcagagctattttgaacaacatcagattcaaattcgcgatgtgaacttctcagtaacgcaaaacgaacgtgatacgatttacactaacgtctatcgcatcgaaattccccgggaaatgcaatatgcagaaattgtggaagatatctcgatgaataagaacatcatgacgattcgaatggtcagtgtctaaaagagtgcgcaagcaggcgtttatatttcgagtattaactggatttgtctgcaatcgccgatgcgacaagtttggttaagcacaggaatatgcctgctggagcacgtttaaaaaaagtgtgctgtctcaatcgggaaatacatttacgaaaaaagaagccccctgataaatttttttatcagggggcttctttttatttcagtctaattaaacgcaatttgtctgtctcttggtaagattaagttgagaataattgcggcaagcgcacaaatcgaaattggtgattcaagtaagtattggatcatttgaggcgttgctttcaccaatgattgtggcatgatgatgatggcgatacatagaatgattggaattccgatgatgtacatatcacgttcttgggtgtgtagtgtgcgaataacatttaacccgttgagcatgatagttgaacaaatgatggcgaaaatcccaccaataactggggctggaatcgctgataagaaggccgctaatttattaaagaagccgaagatgataaaccaaatcccggcagaaacgaatacttttttactagcaacaccggtgattgaaataatgccggcgttagttgcataccctgtaactggtgagccgcctaagagtgcagcgattaaacagctaattccttcaccgataatcccgtgattccattgtttcttcctgatgggcgaatccgtaacggcactcattgcaaaccaagtcccggtcgtttcggtcattaaaacggcgtagataatgacgaaggtcatgattgctgtcatcgaaaagtgcataccatagtggaatgcggtgaaacttggcaagctaaaccaactcgcttcgttcacactttgccagtcaaatttaccaagcatggttgctaaaacagttccgcctaataaggcgatgatgatggaactaactttgaagagtttttgtaatttagggaagtagatacctagcgaaacacaaagaattagaatggcgacggtcacaacagccaggagtaagttctcattgatattgccctgtgctttgaaaatgttatcacctaaagcagatggcatcagtgaaagaccaacgatggtgatgattgtgccaccgacgacttgggggactaagctgttaataattttttggaagaggccggtgacgccgagaagaattaacagaattgaaccgacaattgaagcgccaatcaccgttgccatcccgccgtctttagcaccactagcaaagtaaatcccggcgattgccccaattggaacaaatgaagggccttgggaaacaggcattttcataaaaaatttggtttgaagaatcgtaccaatcccggcagcaaggaatgtcgcttgaattaagccggcttttgcatcaagacccatcgccaataaaccggcaatgataacggggggaacgtagacatccattgctaaaacgtgttgtagtcctaagaagccagcttcttgattcgaaatcggctcgtcaggaccgaccattaatttttgagattgttcattcataccagttgtgctccttttcgtggaccagtttaccttgaacgtagacggccttaatttggtgtttggtgtggcggaataaaagttgttcgagttgttcatctggtgtaagacttgcaaagcgtggtggcgcttgaacgatttggaaatcagcaagcaatcccgattcaatggcaccagcttgaatgccaagactagttgcaccaccgacggttgccatataaaaagcttgtttagcactgatccgactgttcgcaacaccgcgttggtcagccgcaatggtggcgtcaaccccgtcttgtcgaatttgggaggccgttacggcttgttgcaaattggcatataagctaggggtataaccaccggcgatatcactgccaagcccaattttaatgccttgattaagtaactcgtgtgcggggagaatcccgttaccaaaataggcatttgagatagggcagtgcgcaatcgctgcttgttcggttttaatgatactttggtcagtagttgtcagttgtgttgcatgtgctaataccgaatgttgattcaataatccgaatgattgcaacatctcagagtctgtatggccgtaacgttcacgtacataatcgtgttcccagtcgctttcgctgcagtgtgtctgaacggtgatgtgttgggactgtgcaagttgaccgagttgctgaagtgtttcagttgtgcaactagggatgaagcggggggtaatgacgggttgaatgaacccattacgataggtatcttgaattgcttgaacaaaagtttgtgttttattaatggcttcttcaggagaagcatcacgataatagtctggtgtttgatctggattatccatcgcaacacttccgatgaaagcccgttgccctgcttgggaacaaatttctgcgagtcgtagattcgcagaattgtgaattgttccgaaatatagggcggttgttgtgccgttagcgagcatttcggtcactaagtcttgatacacaggtgtggcgaaatctaaatcggcgtagcgcgcttcaagaggaaaggtataatgattgagccaatcagctaaagggcgatcaagggcaattccagcttgtggccattgtggcgcatgattgtgtagatcgataaagcctggtaacaagaagtgtccgggagcgagtgtgattaagtggtcatgttggcgtgcagctgataatcgctcagagtattctgacgccgtttgatgaataatgtttgtgatttgaccattattactgatttctatcagtgaatcttcgtgaaatgaactagaatttggtgaatttgcagaaaaataacttgcttttagtgtgattggcaaacttttaaacctctccttctagatggtgtgttgtaagtatatcacataccataatgcttttaaactttaaaatcgttcgccttttgattcatttctaagggatgctttcagaaaacgacacgtgagcaaaaaggtaccctaaaaaatagcagactgctagaatgaacttaaataagctagttgaaaggatgaatcacatgagtttagcagatgaatttgtagaacggcgttttattgtctttcaatgctataagtgccaacatccagcgatggaaatcacgacgaagacagcactagaagataattcagatggctctaccaagtttcaaattgaaacaacttgcccacggtgtcaagcaaccgatcaatttgttatcaataacggtcaagaaggggaaattagcgcgagtgtcaatagtggcaaagtcgctaaggttgccaacattaaataaggcaatcgacgttcgctaaaagtgaacgtctttttttgtggcgtaaattgtatataattatgaatacatgaataaaaaggctggaaacggttgatttattcaaatataattgacattatgccctttgaattgtatatttattctacttaatacaattataaaggacttattgaaatggcgaaatcaaaaaaaattaacgttcaaggtctcgtattgatgatttttgggtcaatcttcggctttgcgaataccacaattgctttctacttaatgggctatgccagcattatttggtatatcttagcggcaattttctttttcttaccaacttcattaatgtttgctgaatttggttcttctttgaaagaatcacgcgggggcatctattcttggttagaagcatccattggtaaaaaggcggctttcatcgggacgttcatctggttagcgtcatggattgtctggatggtgtcaacagctgctaaagtgtgggtgccgttttcaacgttcctccaaggttcagatcaaacagcaacctggcatttattagggatgaatggcactcaagtggtcggtgtcttaggaattctttggattttattattaactttcctatcaagtcgtgggattgataagattcaaaagtttgcgtcattcagtgggatggccgttgcctttttattcgccgcattcttagtgattagtgtggcgatttggtttaaaacgggttttcatttggcagaaccgattcatgggacgacgacctttgttaagagtccgatgagtagctatcaaacaccaattgggatgttatcatttgttgtcttctcaatctttgcttacgcggggatggaagccatgggcggtgttaccgatagtatggatcagcctgaaaagactttccctaaagggttaatgattgcgacagtcttcattacattaatctacgcggttgcaatctttatgtggggcatctcaacgaactggcaacaagtcttgagcgggaatagagctaacatgggcaatattacttatgttcttatgcaaaacttgggttatcaattcggccatgcctttgggatgacgacacccgttgcgatgacgattggaacaacctttgctcggattaccggtttaatcatgtttatcagttacttaggcgcatttgccgtcttgatttattcaccattaaagtcatttgtactcgggacacctaaagcactctggccgaacggctttgcagaagttaacaagcatggcatgcctgaaaaagcaatgtgggcgcaagcattattagtctgcattttaatcgcggttatttcatttggtggtaaagctgccggtgacttctataatgtcttgactttgatgtctaacgtttcaacatcgttgccatacctctttttagtgactgcctttccatatttcaaggcacgcaaagatttggaacggccttacgaattctttaaatcaccagttgctgttaaggcggtgacgattgtggtcgacttagtccttgtcttcggaattgcctttacgattattcaaccgatgttagaaggtcaatatttagatgccttctggatggtcattggtccgattgtctttacgattatggcccttgctttgtatcatcgctatcaacgaaaagcagtacatggctaaattttttaaaagcgttgaccgatttggtcaacgctttttttgatggcctaattaagggcttgtgaattttaaaagggattaattctcatttaattttaatgtacaaaggaaaatagttgcattttcagattggttccgttttagaactaatctgatttttaaagactaacataaagccccatctagcgattttttaatttttaaagaaagttggttacctaactatcacattagaataaaatgagaataaaagtggacggtgtgcaactttcacaataaacctgtatactttttagatatagttttcagaaaatgaaatcaaagggggattctatgactgtcaaattacaagtcaaaaatctaacaaaaatatttggtaagcgcgtgccgcgtgccaaagaattactgaaacaaggaaaatcaaaagcagcgattctaaaggaaacaggtgcgacaatcggtgtcgaccgggctaacttcgaagtagaatctggcgagatttttgtcattatgggactatctgggagtggtaaatcaacattggttcggatgatcaaccggttgattgagcctactgaaggtagtgtattaatcgatggcgaggatttaatgcagattgataagaaggcattacgtgaagtccggcgtaaaaagatgagcatggtattccaaaattttgggctctttccaaatcgaacgattcttgaaaatacagcctatgggcttgaaattcaaggcattgataaggcgacacgggaacaaaaagcgaatgaagcactcgatttagttggtttaaatggttatggcgatcagtatccgacacaattatctggtgggatgcaacaacgggttggtttagcgcgtgcattagcgaatgatgctgagattttattaatggacgaagctttttctgcgcttgatccattgaatcgttctgacatgcaagaccaactactcgacttgcaagaaacgatgcacaaaacaattatctttattagccatgatttaaatgaagcgctcaaaatcggcgaccacatcatgatcatgaaggatggggaaatcgttcaaaccgggacaccggaagatatcttgacacggcctgctgacgagtatgtagagaaattcatcgaaaacgttgatcgtagtaaagtttacacggccggcaacgttatgattcgcccaacgactgttaatattgaaaaagatggccctcgtttggccttaaaacgaatgcgtgaaaatgaagtttctaatgcttacgttgtcaacagtaaacgtgagttagttgggattattgatgcgcgtgatgtacttgagttagtccgcaaagaaagtcgtgatttgcaatcaatcgtgaatactgaagttccaacaaccgatgaagagacaccaattgctgatatcttagatgatatttcgcaaacgggcattccgtttgctgtcttaaatgataagcaacaattacgtgggattattattcgcggggccgtcttaggggcacttgcaggaaacgaggtgaaccattttgcttaatttaatgacgattgctaaattaccaattgccaattggatggatcactttgtcgattggctgacacaatttactggcttttttaatggtttaacgaattttattggcggaattatcaacgctttccaatgggtgtttgatttaatccccatctggttattcatcgtgattatcgctggcgtcacttatttagcgaatcgcgacaccaaaaaatggggtttaattatctttgaagtcctcggcctactcttgatttggaaccttgatttctggcgggatatgacgcaaacgttaacgttagtgttaacctcgagtctgatttccctcgtaattggggtgccacttggaatttggatggccaaaagcgatattgcccaggcaatatttaaacccatcttagatttcatgcagacaatgccggcatttgtttacttaattccagccgttgccttctttggtatcgggatggtcccgggcgttttcgcatcagtgatttttgccatgccaccaacggttcgtatgacaaaccttgggattcgccaagtgccaaccgaattgatcgaagcctctgattcatatggctcaactgaatggcaaaagttaattaaggttcaattaccattggcgaaatcgaccttaatggctggggttaaccaaagtatgatgttggccttatcaatggtcgtgattgcgtcaatgattggagcaatgggcttaggaacacgagtttactttgctgttggccggaacgatgctgggggcggttttgcagccggcttggcaatcgtaatcttagcgattattattgatcgtttaacccaagctttgaaccggcaacgtaaacattaaggagggattcagtgattaagaagaataaattaatagcttttttcaccttagtggggctcgtcacacttctaacggcctgcagttcgcaaactaagccgtacgctaccgatgagaaattaggcggtcaaattaattacacgattaccggaattgacgcgggtgctgggattatggcatccacacaaactgcaattaacaagtatcatttgaatgatcagaactggcagttgcaaaccagctcaactgcggcaatgaccagtacgttagacaaagcgattgcggataaacgcccaatcgtcattactggttggcaaccacattggatgtttactaaatatccaatcaagtttttaaaagaccccaaaaatgtttttggtcaagctgaacacattaatacggttgttcgtaaggggctaaagaaggatatgccagaagcatataccatcttagatcgattccattggacgccaaaggaaatgtcgaccgtaatgcttaaagtcaatgacggtgttgaacctgaaaaggcggcgcgcgattggattcaagacaatccagaaaaagttgctgagtggactaagggtgttaaaaaggttcatggcacgaaaattaagttaacctatgtggcttgggattcagaaatcgcgtcaactaacgtggtggctgaagttttacgtcaacaaggttatcaaccaacgattcaagctatggaaattcaaccgatgtgggcgtcagtcgcaactaaagcagctgatgcacaagtttccgcatggttaccgaagacctctggtttatactacaaggattacaaaggtcagattgaagacttaggtccgaacttagagggtgctaaggtcggtttagctgtaccgaagtatatgacgaatattaattcgattgaagatttgaaaacaaaatagaatcaaacagcgtatgcgatctgttcagatagaacatggttagatgatcaaatttcggctgttgaaagagtcggttagggcaaagttacttttgttccaaccgactctttttttatttgttagacattctctgttagaataggactattgaatgttatcggaggcggaatagatgtctgttaaggcgtttttagattttatcgaattacgcactaaagttggtagcgtgattccctttatggctgggttcttttttacgttgtattatttccaccaaattgatccgatcaataccgtgttgtacttctgtgcattggtgttaattgatgtcttcacaacgggatggaataattacaacgactttcacctcgctaaaaatgaaacgctccagcaatcaaccagtgcattaggacgacaagatattgcccctaaggttgctttacgctggttgatcggctttataagtacggcaaccgttctggggctgattctggtctggcgcacaaatttaattgtgttagccatcagtgttctgttcatcttaatcgggattttatatacttacggcccattcccaatttcacgattaccactgggtgagttgttatcgagtctggtattagggttcggtaatttctttttgacggtgtatgtcaacgttccggcggatcagttggtcgatttgcgctttgatgggccgttaatgttattccaactgaattggctgaatgtgattttggtgtttgtggcgagtttaccaactgtcttcctgattgctaatttgatgttaatgaacaatatttgtgattacacagtcgatttagagaatgggcggcacacattaatcagttacattggtcaaaagcgcggcattcaactttatcaacttagtgcgtatagttgttacgtggtgattattgttgggattggcctgaaattatatccatggccagcagcgctagcttttgcgagtggcccaactttgttacgtaatgggtttgcattacagaagagtcaggaaaaacgcgttgtatttggtacagcggttcagaatctaattgtctttaacggtttttggctagtgggaatgttgattggcctctatctttaaatgaaaagtcactgcggtggcttttttatttcaaaaaaagtattgattgtatatacaattttgattataccgtgattattaaaacgcttatatgtggagatgagagttatgacatatgcaatgattgggacttggcgaatggcctttgaagggattcaaaaagcgatggctgatttaaaaaatggtgggcaaagtacggatgcaattgaaaccgctatcaaaaaagtggaagattaccccttctttaaatcggtcagttacggtggtttgccaaatgcgcaaggcttagtggagatggatgcggcattcatggatggcaacacttttgcaattggtgctgttgcaggaattagtgatgtgaagaacccaatctcagttgcgcgtcaattaagtgacgatcattttaatagtttcttggttggtgcgggagcgtcacaatatgcgatgtttaacggttttgaaagccgtaatatgttgaccgaacgcgcacacaaaatctggatgcaacgaattaaagaaattaacgaaaaaaatcttagcccatatgatggtcacgatacagttggcatggttagtttggatcaagctgccggtatggcagcggggacgtcaacttctggattatttatgaaaaaaccagggcggactggtgattctgcattatctggcagtggcttttacgtggatagcgaaatcggtggcgcaaccgctactgggttaggcgaagatttaatgaagggctgtctttcatatgagattgtgcgcctgatggggaccggtttatcaccacaagcagcgtgtgatcaagcagtctatccgtttgttgagaaattaaaaaaacgctacggcaaagctggcgagttttcgttggttgccttaaataatcaaggtgaatggggcgtggcgacgaacgttgagtttacgtttgcagctggcaatcaagatgcggcaccacaaatttttatggctaatccagggccaagtcaaacgacggtgatcgaacccatttcagcagaatggcttgaagcctacgcgaaacggattaaagcaccagttgaatagaggaagtggttggaatggttaagtatctatacgttgaaattgcagaagccttacgagatgacattcaaaaaggggtctatgggatccatcagaaattaccatcggaaacggatttagccaatcaattttcaacgacgcggctaacaattcgcaaagcaatcgatctattggttaaacaacatgtcgtggtacgcgatcgaaatcgtggtacctatgtacttgcaacacaaagtaaaatttcgagtggttcatctggtttagttggttttaccgaagcagccaaacagtttcaattggatgtcagcacgcgggtgttagatttacgccggacaatcgtttatccggactatgtggcctccaagttagatttagcaccacaggagccagtttggcagattgaacgcttgcgaatggcagacggtgaagcgatgacccacgaacaaatctatctgaaacaaaaaattctaccagaattaacggcccatgaggcacaagggtcactctaccgcttgattgagcaaacaatcccaatcgggtatgccaatcaagaactcgaagcagtcgtattggaaaaaaggcttaagtgacttacttgagacctctccagggcaacccgcttttctagcccacacggttgcgtattcaatggacggttatccaattctttatgataactcgcattatcgtgctgataaatacacgttccataacatcttgcaacgtgaacattaaaaggagggttttaaatgaaagtaattgtcttgttggatcaaatccaagctggattaggtggtaaggaaaaaggggatacccctttaggtggaaaaaaattagcgatgggtgctgcggatacgctcgataaggcattaaaaaaaatggactctgaaattatcgggaccttttattgcggaactgattattatcaggcgaacaaagccgaagtgaatcggaaagttgcgaagatgagtgagaaaatgggtgcagacgttgtgattgcgggaccgacctatgattatcgggacttttcgacgatggcgtgtgaattagcagccactattcaaaaagaaacaacaattccggttgttgggctgaccgcgatcgaaaagaatgccgatttaattcaacagtatcaagatcaaataacgattgtgaagatgccaaaaaagggtggtactggtctttcggattcaatcgaccacgcattgcagttatgcaaaatgaaggttgaaggcgctgattttactgattttattaaccaatattgttattaaaaggaggcaaaaccgatgcaaaaggaactcgaacagattttgatgccggttgcgattaaactggggaataatgttgtactccgatcattgcgagatggtttcttaatcattacgccattgattatcgtgatatcgattttcttactgattgggaattttccaattcctggttggactgaattttggagtgggattttagggccgcactggacagaatggtttagtgctgtttctaatttagtgtttagttttacagggttgcttgcttgttttgggatatcctatgcctatggtaaaaaccgagggttacaagcgattcataccagtgcaattgctattatttcattcttaattttgacaccgactgttgtcaccgttggtaaaaaatcaatcggtgccattcaaacaatgtatttgggacctaacgggattttcctagggatttttatcgcattagtcagtgttgaaatttaccgttttgcgattaaacgcaactggcgaattaagatgccagatggtgtgccacctgcagttagtgaatcattcgatgccttactaccggctggcttagtggtattagttttcttcttaattcgaattggttttagcctttcgagtttcgaaacggcctacaatttcatctacacgttactgcaacaaccgttaaaaggtgccagcaactcattgccatctgtattgctttataacttcatcgcaatgttgctctggtgttttgggattaatggtccaactatcaccaacagtgtgtggtcaccaattttcttcgttctgacgcaagataacttaacagcattccagaatcatacgcagttaccacatattttcacccaacaatttattgacatcttcaccacatacggtggcggtgggagtaccctgtcactcttaatcgtcatgttaaccgtctgcaagtcaaaacgcgtcaaagaattgggtaagttggcaattgtccccggtattttcgggattaacgaaccgattatcttcggtttgccagtcgttttaaacccaattattgcaattccattcattatcgtaccggtcttaaatacgttgatttcagggattgtattccaactcggatgggtaccgtatacaaatggcgttatgttgccatggacaacaccaccgattatttctgggtggctttcaactgggagttggacagggtcagtcctccaattatttgaattagtgcttggaattttaatttactatccatttatcatgatgattgatcggcagtatttggcggaagaagccgaagcggctggcttagacgatgttgatattaattttgacgaaatttaatagaaagaagccattcttgtgaaaccgattagagcagattttaaggcattatttgaagcacatgctgatgagttcttagcggacttgcgggaagtgttacgcgtgccgagtgtgtgtggagcgcaaacgtttgaagcgccgtttggaattggtccgaaacgcgcattggaaacagtgttggcgattgctgatcgaatgggctttaggacggggcaagtcggcaattgtgttggctgggcagaatatggaccagacgaaacgcaagcgccaacttattttgggattcttggtcatttagatgtcgtggatgttgaagatgattggcattatccaccatttgaactgactcaggtagataatatgctgtatgggcgtggtgttttggataataagggaccacttttatcgacattatttgccctgtatctgattaagacgcaaaagataacatttaaacaacgcgtccgaattatttttggcacttatgaggaatctgggagtcaggatatgccaatttatttggcggaacattccgcaccatatgccggattcacaccagattgtaaatttccagccgtctacggcgaacggggcttgttagatgtccagttagcgttaccgattacggacggctctgagcaacaaattacggcgattgaaggacggttcgctaaaagttatctgccagatcatgcacagctgattttggccgatggcacggttaaaacttatcacggcaaaaaggcacctagcaatgcccccgaaatggcggataatgtgttaccgaagttagttgccgatgcaagtcaactcactggtcaaacgggtcaattttatcaatgggtagccgctaaaatcgggacgcagtcaactggggaaaacttggggattaattatcaagatgaagcatcaggagcattgcaacttgctttttatggggtatcgattgaagcccaacagttaagtgtgcatctgacatgtcgttacccaatcccagtgacggaagatcagttgttaactgggattaaagctgccatgttgccggggatgacgttgacggttaaacggcgttatccatcgcaagttactgatccaacattgccatttattcaacaaccctctgcgatttatgcggcagatactggtttggatggcacaccggtcacaacaacgggcgtgacttatgcgcgcgcgttaccgaacatcatcgcgtttggcccatcatttccaggtcaaaaagggattgcccataaaggggatgaatggcttcaattcagtgactggcaaatgatgatgcagatttattatgatagcttgctcgcagtcggtactggaatataaaaaagcgtgtgccataagtcgggataccctgaggattagtcggaaggggatgacttataagaacacgtttagacgattaaagttctaatatcaaaaaaggggctgagacaaaatttacttttgtctcagccccttttactgtttagcgacttgctaatgcgcccattggatcccatggtgcgagaacagttgggtgatcgtattcttctgtttcaatgcgtttcatttcatccgttaagaagcgtttgttgatcacgatttgataaacaaattcgtcaaaccaactatcactcatgacgaagtaacctttcgtcccaactttgtcaccccatgagttttcaaccttccatttggttggttgaccatcgacgaggtcgacaccggtgatgaccatcgcatgggtcatgagactttcaccgtaatcaaggcgttcgcctttagaaattgaaagatccatgccgagcatggcatctttttgataaatttcagtgtccatgatgccgagtttgcgatcagatgattggcctacatcgctaccgaaccaaacggattcacctgcttgtagttgtttaatcgcgagttgtttgaaagtgtcgatgtcgaggtttaaatgccgcacttcacggccaccgaccacattgcccaacatttcaacgctgtataagtggttgtatggtttgtcggcagttggtgagttaatcaatgaaacgtaattttcgaggtcccagccaacgtatttttgatagaacgtttgcggtgtgaggcctttttcgatgtgatagttgtgatcatcatcgcggtattcaaagtcgaattcaacgggtggttcgcccaatgcataaacgagcatccggtaaacttcggttaacatcgcgtcttttttagcttggatgtcggcttcgctaacaccgtctgctactaattggcgtaatgtaacggcatctttacggagtttaaggttcaaaacgccgttgagttcgcttgatttttcactattatatgtttcgggcatgactgacttaggtacaatcccgtatttttcgatgagtgcgcagagcatgtcccattggccgccatcttgttggggcgttgtcattaagaagtcgactttgcggtcgccaattggttggctggcagtcttcaagacgttttcgtagaagtagtttgatttttcgaatttgtcccagaagttggtgtagttttgggacaattcgaaatccttaattttgaattggtcttggaggctgtggcgcattgtatttaacgcggcgaacatccagcaacgaccagattgcttttgattggaaacggcaccggtatctaagtcgattgaaaaaacgggggccattttggcttttgaatcggtattagcactcgtggctaaaaagccgttattcataatggcatttttaattgtgttggattgtggtgttgccttgaaatcggctttgaattgttgaatatcttttgctgtaatgggttgaaccatgtggaaaacctcctctaaaatttggtgggttaaattaaattacccggtttgaatggcattatttttttgaaacgtgctttcatcaacaacttcttccgccttacctcacttgccaaatcggcgactgcattgccaattcgtcaagtgctgtaagtgctcagaagtaacccgttgatggcgcactctgatttgaaacgtgctccgtaagccatatccttccggttaaccctgaacgtcaaacgattgctggcgcaatccttcgtcgttctgtgttaatcctcaggataaactcggcttactacgcactctattgcagtgcgtcccatgggtctagcttaattggggtttttgtgagtgcggcttgttcttcttttgtaaggtacgcttttttgacaattacctcgtaaacgtagtcgtcaaaccaagcgtcgctcatactgaagtaaccttttgtaccgactttggcactccatgtgttttcgactttccatttcgttggttggtcgtttacgaggtcgacaccggtgagggtcatcgcgtgggaaacaacgccttgtcggtagtcaagtcgttggtcttttggcatcgtcaaatcgaaaccaaagagtccagaatagtcgtaaaggttgcgatcaagccagcctttttgtcggtccatatccgcgagcacgtcattgccaaaccaaattgtttcaccgttttgtaaggattggatagccagtgcttttaaacgttcagggggtaagtttaagaggcgcattgggtgaccttcgactaccgtgttttgcgattctaaactgtagagttggttgtattgtttacttgtttgggggctgctgacaacggtgatgtagtcgtcaaagttgcgattgagatatttttgatagaaactttgcggggttaaaccgcggtcttcatggtaattttggtcgtcatcgcgataggtgaagtcaaacgtttcgactggttcgccgaatgcgtaaacacatagccgatagatttcacttaagaaaccagtccgcgtttcactgatggttgtttcgctagcgttgtcagcaacaagttgccgtaattgaatcgcatctttgcgcagtttcaaattaagagtgctgttgaattcagtggttaagtcactgttataagtttcgggcatgaccgacttgggcacagcaccgtatttttgaatcagtgccactgcgttgtcccattggccaccgtcaaaatcgggaccagcgagggtgaaggcgacttcgcgatccgtaatcggcttgtcggcagttgctaaaatcttttcataaaagaggttcgccttttcgatgcgatcccagaaagatagataattttgggagagttcgaaattcttaacgtgatatttctgttcgaaatcgtggcgtaatgtatttagagtggcaaataaccagcaccgcccactctttttttgaaagctgacatcaccagtggggaggtcgattgagtaggttggatcaagggtgacggcagcatcggggcgttgactaacggcgttaatgccattcgtcatcacagcatttttgagcgtcgttgcttgtggcacgccagctaaagcggtccgcatcttgattaaattattatgtgtaatttcttgggtcatctaatcactccttaatttttgaattagtttaattctagttgattagatgggagatgtaaaccgaataacggggataaagctaaaagaatggtgattgataaatgtgaaagaaaacgatttatatgagagcacgggacacaaaaaaacgaaccgctgagggttcgtttggaaacgtgctttttaaagctgacgcttgcgcttagctacgtattgcaaacgaccgattttgtcggtcatttaaaacactgtgctagtgcacagtgtcaaatctcctttaaacgcacgctttattttgctgttaaaatcttcacgccatcaggtgcgccaaccacgacttggtcgacgatgtctaggaatagaccatgttcaacaacgccgacttgttcactgagccatgatgccagtaggtggggatgttggacttggttgaggtgtaaatcgatgacgtagtttttagaatcagttaagacgtgttggccgtctgcagtcatccggaattctggatttaagccttctttagccattttgttgaacacttgttggctgccaaatggaatcacttcaactggtagtgggaagcgaccgattgtatcgaccactttttcttgatcaacaatccaaatgttgcgggttgaagtagttgcgactaatttttcgaataagtgcgcagcaccgccgcctttaatcccttggaagttggcatcgacttcatcggcaccatcgatggttaaatcaatgtggtcgacatcgttgagtgctttgaccggaatcccaagtgatttggcttgttcttcagtacgaattgaggtgcagacacatgttaagttgaggtgttctgcttgtacccgttttgcgagggcttccaccatgtaaactactgttgaacctgttccgagtcctaaaatcatgttatcttcgacaaaatccactgagcgttcagctgccatctttttcattgcattcttatccatcaagacaccccttttgtattaataaatctattatacgaaaaaaacgctttaattgggcgctttttgttaaatttttaattaaatcagccttaggcattattcacagcctccgcggtttcatggtatgatacagtggtacaaaaagaacccaaatgggcgataatattaggagttttaggaatgaaaaaacgcggctttgaaattgtgaccaaataccaagaggcgggattgagtttaccggtgcgttcaacagcgcattcggcgggctacgactttgcttgtgcggaggacttcgtgttgccatcaatctggcattacaactttgtgcgtttgttccgaatgattcgaaatggcaaaccgttagtggatgacgattttgaacgcgcatcaaaaacgttgaaaccctttctagtaccgaccgggattaaggcttacatgcaagacgacgaatatttaatgatcgccaatcgttcaagcaacccactcaaaaaagggttaattttacccaacggcgtcggcattatcgatgcggattactacggcaatgatgccaacgaaggtgaaatttttatccaaatggttaacttcagtccgcgggatgttatcttgaaaaaaggtgaacgaattggacaaggcatcttcatgccatatttagtcgcagatgatgaagcgacggtaaccaccaaacgaacgggtgggtttggctcatctggtcgctaaacggtaatcgctaggtcgccgaaaattcacaaacttatgttaaaataaaactaatctcgataatgaaggagaatctttgtggctaaaattaagactcagtttgtttgccaaaattgtggctatagttccccgagattcttaggtcggtgcccgaattgtggcgcttggaaccaaatggtcgaagaacgtgaacaacctgcagctagcgcgaaatcaagttttacgatttcagggcgggcaactgaaccagaacaaatcagcactgttaatattcaaaaggaaccgcgtattaaaactgaattaaacgaactcaaccgcgtgcttggcggtggagtggtaccgggctcattgattctaattggtggggatcctgggattgggaaatcaacgttactcctacaagtttccggacaacttgaaaaggttggtaagattctttatgtttctggtgaagaaagtgcatcccagattaagatgcgggctaaccggcttgatgtgaatggcgatcaactttacttatatcctgaaacggatatgggcaatattcggcatcagattgaaacaatgaaacccgactttgtggtgattgattcaattcaaacgatgagcgaaccagaagtgacttccgcagtcggtagtgtttcacaagtgcgtcaagtcaccgctgaattgatgcgcattgcgaagacgaaacagattacgatttttgtggttgggcatgtcactaaagagggcgctattgccggtcctaagattttggagcacatggtagatactgtgttgtactttgaaggggatacgcatcatacttaccgcattcttcgctcggttaagaaccggtttggttcaaccaatgagattgggattttcgaaatgcgtgaagccggcttaaaagaagtcgcgaacccatccgagattttcctagaagaacgtttggcaggggcgacaggttcagccgtggttgtttcgatggaaggcacgcgacccatcttggtcgagttacagaccctaattaccccaacactattcgggaatgcaaagcgcacgtcttcagggttagatcataatcgagtctccttgattatggcggtgcttgaaaagcgtgctagtctcatgttatcgaaccaagatgcgtatttaaaagcaactggcggtgttaaattagatgaacctgcgattgatttggcgatggctgtttcgattgcatcaagctatcgggataaagaaattccaccaactgattgtttcgtcggtgaaatcggtctgactggtgaaattcgccgggtcaaccggattgaacaacgcgtcagtgaagctgctaaattaggctttaaacgtatttatgtaccaaagaataacttacaagggtgggacgcaccgacggatattcaagtgattggtgtgaccacgattgcagaaactttaaagaaagtattcaactaggcataagttggagcgagaggaggttgaacgatgcaacaaaaacgatttactaaaaaaagaatattaggaattgtgttcattatcttaggaggtgcgcttggaattacggcgttcccagtattttggccattagttcatttggaagacatgatgtatctcaataacggtattactaacgccattttaggggccattattttctatctattattcttggcgctggcaacaccaatgttgagagctatgcaccggcttgaaaaagccttaacgaaacaatcacctagttttattttatttgggagtgttttttcactaattggattgttattagcaaacgttgtttcgattccgctataccggatgcccatttttgcattaaatacagttgtacccattttattgatgattgctttagggtatctcggctttcgaattgggacaacgcgaatggaagaatggcgccgtttgatgcaacctaagaaacgcaatgctgatgtattagaacgtaaagtcggcgataatttccgtaagtataagattctagatacaagtgtgattattgacggccgaataaaagaaattgctaagacgggctttatcgaaggcacattgatggtgccaaactttgtcttacatgaactacaattaatttcagattccgctgataatttgaagcgggcacgtgggcgccgtggactggatatcttaaacgatattcaaaaagacgatagcttatctgttgaaatgtacgacggtgatttcgaggatttaacggaagtcgatagtaaactcgttaaattggcaaaattacttgatgggattgtcgtgacgaatgattataacttgaacaaggtctgtgaatttcaaaacgtaccggtcttcaatatcaatcaactcgccaatacgttgaagcctgcagttttacctggagaagcgatgaccgtgacggtggtgaaagccggaacagaacggcaacaaggggttgcctatcttgatgatggcacgatgatcgttgttgaagatggccaacattacttaaataaaccgctagaagtgattgtgacaagtgcgcttcaaaccgctgcggggcggatgatttttgctagaccagcgcatcaacaaaaaggcttgaaagaaaaatagccacgcagaacactttacacggtcgtcaataatctgtatcatggagaccaactaaaccgttaaaattgatgaagagaataagtagatgatgccaattgttaagagagctttcgaattgctggaagaaagccgattgccccatcgaaatgcacctctgaaatgccaagtgactttgtgacttagccgggacaccgttacctgttcaaggcatttttgcaaagaaaagtggaaccacgctcaatcggcgtcttttgttaaccaacaaaggacgctttttatttggaagagtgcgtttgaaacggtttgacttcgagcatttgcctaataccgtgagggagcgccaccggcgatcgtttgcggtatggagcaaagcacagaagtcagtttcaaaaagcacgtttagaagaagagtgcgacagcaggtggttatattttgagcattaactggatttgacgaattggcgatgcaatcgccgattgggcaaatttggttaagcgcagaaataagcctgcaagagcacgtttaagaaaggaagattcgatgttaaccgtttataataccctcacgcgtcaaaaagaagtcttcaaaccgattcaagcagaccgcgttaaaatgtatgtctgtggaccaactgtgtataactatattcatattggtaatgcgcgtagtgcgattgcctttgatacgattcgccgctatctcgaataccgtggctatcaagtcgattatgtctcaaattttaccgatgttgacgacaagatgattaaggctgcgaatgcggaacaaatcacggttccggaattagctgaacgctatatcaccgcttttaaagaagacacccaagcacttaatattgaaacagcgacactcaatccgcgggcgacagaaaacattccagaaattatcgcgttcattcaagacttaattgctaaagattatgcctataccgttgatggcgatgtttactatcgtgctcgtaaatttaaggactatggccatctagctggtcaagatatcgatcagctcgaacaaggggccagcgaacatacagcaaccgaagaaaccctacgtaaggaagatccaatcgactttgccctttggaagtcagaaaaagggaccgatattgcttgggattcaccttggggtaaggggcgaccaggctggcatatcgaatgttcagtcatgtcgaccaaatatttaggcgacacgattgatattcatggcggtggccaagatttagagttcccacatcatgaaaatgaaattgctcaaagtgaagcgaagactggtaaacatttcgtcaactattggttgcacaatggctttgtgacagtcggggatgatgatcaaaaaatgagtaagtctcttggcaacttcgtgacggtgcatgatttgattcaagaagttaatccacaagcattacgtttcttgatgagtagcacgcaatatcgccgaccaattcgctacagtgaatcattattagctgaagcgcaaacgaacctggatcgtttaaaaacgaccctcgataacttagcgttccgccaagcgactgctgaagcgggtgcagacgcagacattgccgcacaagcggcaagcttggaagacgcctttgtgacagcgatggatgatgattttaacgtgcaaaacgggttaacagaattgtatgaactcgctaagcttagtaatcaatacctggaacgggctaccgtccaagctggtacgttagtggatttaactgcccgtctaacgcgcttgttagccatttttggtgttgagtttaaggcggcccaactgttggacgcagaggtcgaaagcttgattgaagaacgcaaagctgcacgggcagcaaaggattttgcccgcagtgatgcgattcgcgatcaattgaaagaacaagggattattttggaagatacaccacaaggaatgagatggagacgcgcatgaaaaatgctttacaactaaacgggattgcgttggcatatatgggcgattcagcctacgaagtgtatgtccgcgcccatttgctagaactcggtttaaccaaaccaacgcgcttgcaacaagtggcgacacattatgtgtcggctaaagcgcaagctgctttgattggtttgatgatcgatgataattatttaacagaagaagaaatgaatatttttaaacgcggtagaaatgccaaaagttatacgaaagccaagaatacgagtgtttcgacttatcggacctcaacgggctttgaagcagtttttggctatctatacttaactgaacaacaagagcgcgtcgctgaattagcccactggtgtattcaacaagtcgacgctgggaggacccatgagaaaaaataataaccaaccattcaaacaaaagaacaacgaattcaatagtcgtcggacggccaataattcggcaaagccaacgcgccgtccagctaacaagaaaccagcagcacccgtcgaagaagcagttgttgaagaacaaactgatttcgtcatcggaaaacatgcttctttagaaacattgaagaccagtgatgcgaagaaaatcaataaaattttcttacaagatggcttgaaggctgactttgtccacgatgttgtgaaattagcgaaagaaaaacgtctaatcattcaaaatgtgcctaaaaataagttggacttattgagtgaccgtcaaaatcaccaagggattatcttagcaatcgcaccgtttgaatatgcgagtgttgatgatattttcgctaaggccaaagcccgagaagaagaaccgtttatcttaatcttggataacttggaagatccccacaacttgggttcaatcatgcggacagctgatgcggttggtgtgcatgggattattattcctaagcatcgtgcggtggggttaacatcaacagttgctaagacatcgactggtgcgatcgaacatatcctagtggcgcgtgtcacgaacttaacacaagaaattaagaaattgaaggaccgtggtctttggatttttggcaccgatatggctggtaccgactatcgtaagtgggatgctaaaggaccaatcggcttaatcattggtaatgaaggcaaggggctttcaccaattgttaaaaaagaagttgatcaaacgttgacgattccaatggtcggtcatgtgcaaagtttaaatgcgagtgtcgctgcgggggttttaatgtatcaggcttataatagccgtcaacctttggtatagcagatgaaaaaacagatcttaattgcagatggttataatatcattgggaactggcccgagctgaataagttgaaacaaaatgatcatctcgcggatgcgcgtgatcgcttattgcagatattatcagaatatcgcaagtttcgtgagattgaagtcatcttagtatttgatgcaatgtatgtgccagggattaaacaaagttatgtgcagtataatttggaagttgtcttcaccaatgaggatgaaacagcggacagttatatcgaaggcttagcgggtaaattaatgtcgccgattacgcaagtgacggtggtttcgagtgatcaagctgagcagtggacgattttttcacggggcgcattgcgggtgtcttcgcacgatttttatcgtgagattcgccgaacgcaccgtgaaattgaccatgatgccaagcattatcatgatcggaccttgcaacggaatatgccgtggaatccggcgcaactagatcaacttgcacaggtgcgagatgcactaagtgctgaaaaagatgattaaacaaacgttctcttaataaatgtacgataacttgttaagataaaggcgtggggttgcgtgagaggtggttcattgatggaattagcaaaacgtgatgcaaacttaattcaagcggtggttgaaaacgattctgaggcgttggatgttttatttaaagcctacctaccaatggtttatcgcacctttactccatattatattcgcttatttgatgaggacgattggttacaagaagcgcgaatcgtctgttatgagacttgccagtgttatgatcaaaattgcggcaaaagttttggtggtttttataaattacgctttcaccaccacgtattaaacttgattcgcaaagaacttgctcagaaacgacgggtcgatcagcaagccctgttatttgattgttgtccggaatgcaatgcgctcgctgaagataccgtggcatactatcagtcaacggttgaaatgcgggcgtacttagagacactatctgctttagagttagtggcctttcgggttttgacggggcaactagcagttgagcaagcgtgtagccagctagattgcacgtttgaacagatgaaacgggcacaatcgcgttgccagacaaaattaaaacgattctatactaaacaataaaatagctaaaagctgctaaccgacgatttttaggcattggttagcagttttttgtgtttagtagggagcataaaaaatacttttcatgcgataaaataacaggtgacaggttaatgattgggataggtcaacaaaatgggcggcttatatatttttaaataacattaattgacattaataaagaaagcgcttatactaaaaacatagaggaaatgaaaacgctttttataagccttttatcgctttctaaccaattaaaatttaaggggtaattcattatggcagaaaaaacaatcatgttatgttgtgcagcagggatgtcaacaagtttattagtttcaaagatgcaaaaggccgctgaagcacaaggtttagacgcagaaatttttgcaactggcgcttcagatgcagacaaccaactcgaatctaaaaaaattgactgcgtactattaggccctcaagttcgtttcatggaaggtcaatttaaagaaaaattggcaccaaaaggaatcggtgttgaagtaattgatatgaaggcttacggcatgatggacggcgaaactgtcttgaaacaagcgttagcattaatcggttaaaaaaagattaagaaaagcggtagcgacctatttttaggcggctaccgctttttttgtttatgaatcaggtataattaaggtaatcaagtataaaggagtttattcaatgagtttaattggtacattaatttggtggctattcgggggattagtagaggctatcggttggtttattctggggattgcctggagtattacgattattggaattccagtcgggctacaatgttttaagattggcgcattgaccttgatgccgtttaacgcaaccgttgtttcaacggggggtgcaggttcgtttttattaaacattgtttggtttttcttaggtggtcttgtgatgtgggcgagccatgtcttttgggggctattattatcaattacgattattgggattccatttggccggcaacactttaagctagcggcgttatcgttaagtccgttcggcaaacaaattaattaaaatgcaaaagggcaacgatattgatcgctacccttttttatgtggtgcaggcatatttctgtgcttagctacacaagtcaaacgattgcttgtagcaagcattcgccttgttaggctgatgctcgcagcataaccggcttttgacgcactctattgtgttagttcttctagtgccatcgcttgttcttcccagtctgattctgtttgagcgagttcagcttggactttttctaggtcttgttgtagttcttgaagcatgaggggtttagtaattacgtctgcttgggtcatttgttcttggattgcgttggccttagtctctagtgcggccattttttcttctaaagcagtaacttcgcgttctagtttccgttgtgcacgttggttttccttacttgctttgtaggcatctagtgcattggcacttggttggataattgcactgttttggctagctgcttctgcgtaagctgtttcttcagctttcttggcgaggtagtaatcgtaatcaccgaggtatcgtttgctaccagtatctgatagttcgataatgccagtggcgacttgattgatgaaataccggtcatgggaaatgaagaggacggtgccatcgaattcacggagggctttttccaagacttccttgctatcaatgtccaaatggttcgttggttcatccatgattaagaaattgtcatggttcatcgcgagtttcgtcaagagtaagcgggctttttcaccaccactgagttgtgacacaacctttaaaacatcgtcaccggtgaataagaaactaccaagtagtgtgcgaatttccttttcaggtgttgtatggtgttcatcccataattcgttgaggacggttttgttagtgtgtaaattgcgttgctcttgatcgtagtagcccattgaaacgttactaccgactttttcatggcctttgatgaacggaatttggtgcaagatacttttgagaagggtcgatttaccaattccgttaggtccgatgatggctaagcgttcgtggcggttcacttcaaaattgattggttgtaccatgattttatcgggggaatagccgacagcggcattgcttacttgcaatacttcgttaccgcttggatgttcgctttcgaaatgaaaatgaattttaccggcttcgttttgcggccggtctaatttatccatcttttcgagttgacggcggcgactttgggcttgtttcgtggtacttgcgcgcactaagtttttatcaacaaaggtctgaagtttatcgatttcagcttgttgtttttcataagccttccattcgagtgagaggttagcttcttttaaacttaagaaatggctgtaattaccggtataatgggtcaatgtgtggcgactcatgtcgtagacttctttagtgattttatctaagaagtaccggtcatgcgagacggtgagcaaggcaccgggataagtttgtaaataattttccaaccatgttagtgtttcgatatctaaatggttcgttggttcgtccaaaataaggacgtcttttttctcaagcaataacttagcaagtgcgagtcgcgagcgttcgcctcccgatagtgtactgattggcttttcaaaggtgtcttctggaaattggaaaccatgtaagacgccacggatttcggcttcatagccgtaaccattagcttcagagaaatcgtgttggacttggtcatatcgttttagtaaggctgcatattcttcgctagcatggtcaatggttgtgtccgcaattgcggtctcgagttcatgcatttgggcttccatttggcggagatcatcgaaaatggttaacatctccgcatagattgtccgggttgagtctaagccactatcttgcgctaagtaaccgacttgagcatttttgctaagaatgatttggccttcatcaggcgttgtgatgccggcaatcatttttaataaggttgatttaccagccccgtttggaccaacgagggcaacacgggcgcggtcttgtacttcgagttgtgcgtttttgaaaaggtaatcgccgccaaaactgcgtgcgacttgttgaacttgtaataatatcacggctaaaaatcctttcgtgcggtgttttttaaagttaattgcgttcatttttataatactactgtcaactatcataacagatttaaacgatggacagtcaaaattgtaaatatattgcttttcacaagaaaattcagtatgatttcagtatggtactacactattttcacaagcaaatcaaaaaggaggtttcaaatggttgagaataatatcccaagagcaactgcaaaacgattgcctttatattaccgctatttaaactttttgaacaattcagggaaaactaaaatttcctctactggattatctgaagcagttaaagtagatagtgcgacaattcgtcgtgatttttcatatttcggtgcactgggcaaacgtggttatggctatgatgtcgcttcgttgctagattttttcaagaagaccttgaaccaagatcgattgacaaacgttgcattgattggggtggggaatttaggccacgccttattgaactacaactttaagcaaaccaataatattcggattagcgcagcatttgatgttaaacccgaaatgattggaacaattcaaaccggtgttcctgtctattcaatggacgagatggccgaacaattgaagaaccaacagatcgagattgtcattttaacagtgccaattgatgaagctcaagaagtcaccgatgaattagtggccgctgggattaaagggattatgaactttacgccaattcgaatttctgtgccatcaaacgtgcggattcaaaatgttgatttggctaaagaactacaaactttgatttacttcctcgataattatactgatgaacaaaatcaagaataaaaatagcgtttaaacaagttgctcgtagtagccgcctgtttgaacgctttttttaacgattgagatacagtaaagtgacgatcaggttcatcccagcatggctgatgattgtggtgaaaatcgaacctgtcttgcggtacagccaacataggaaaagaccgatggccgtgtagattaacaaatgcccgtcctgatgtaaaaaagcaaacagtaaacttgaaatgatggcggctaaaatgcggtttaagcgactggctaatccaccaaagattgctttgcgaaacgtgatttcttccataatcggtgcggcgatggtcgttgctaaaataagaaacggttgttgttgcatcatggtcatcagtgaaatggtgttgagcgatttggcagtgatgtggagaatgttttgttcaatgaagccggcgagaatctgaattactaagaccagtacaatgccacacaacccccaaatgataatgggtttgagtgggaaaggccgctgctcaatggcattggcttgtgtgcgttgattaagatagagtaaccaggcggcaccgaggcaatcaacaatggttgtgattagaaaaaacgaggcagatagatgaccaaaacggacgactgcactaggaatcaataaaatgaacaaatagctaatgataattgaaaaattttgtttgtatagcgtcatgtgaaagctcctcaaaggttgttgtgacaatagcttagcgtattagcattcaaattgcaaaagtgctagcataatacttgcaatgttctgaaaaaatgctatgataaaaattgtgattagcacttgagatgatagagtgctaaaaaagtaaaattgatggagggattttaagtgttaaaaccattagaagatcgcgtgattatcgccgttaaagacgaagaagaacaaacagtaggtgggattgttttggcaagtaatgctaaacaaaaaccacaaaccggcaaagtagtcgcagttggtaccggcacattaacaagtgacggcaaacgaattccacttgatattaaagaaaacgatgaagttatttacgataaatatgcaggttcagaagttgaatatgaaggtcaacaatatttagtgctccatgctaaagatattatggctattgttgaataataataaacaaaaaaattttttgaggtgaataaattatggcaaaagaacttaaattttcagaagacgcacgttcaaaaatgttggcaggggttgaccaattagccaacacagtgaaaacaacattaggaccaaaaggccggaacgttgttttggaaaaagcttacggttcaccagaaattactaatgatggtgtgacaattgctaaagcaatcgaattagaagatcattttgaaaatatgggtgctaagttagtttctgaagtggcttcaaaaacgaatgacatcgctggtgatgggacaactactgctactgttttagctcaagcaattattcgtgaagggatgaagaacgtcacagccggcgctaacccagttgggattcgtcgtgggattgaattagcaactaaagaagctgttaagaagttacacgaaatttcacacaaagtcgaaagtaaagatgccattgcccaagtggctgctgtttcatcagctaacgaagaaactggtcgtttaattgctgatgcaatggaaaaagttggcaacgatggggtcatcacagttgaagaatcaaaagggattgatactgaattaagcgttgttgaagggatgcaattcgatcgtggttacttgtcacaatacatggtaacggataacgataagatggaagctgacctagataacccatatatcttaattacagataaaaagatttcaaatattcaagatgttttaccacttttacaatcaatcgtgcaagaaggtaaagccttgttaatcatcgctgatgatgttgatggcgaagcattaccaacacttgtcttgaacaagattcgtgggacattcaacgtggttgctgtaaaagcccctggttttggtgatcgtcgtaaggaacaattagaagatatcgccacattaacaggtgccacagtgattacaagtgacctcggtctagaattgaaagaaacaactatcgatcaattagggacagctggtaaggtaactgttacaaaagatgatacaacaatcgttgaaggtgctggtagcaaagatgccatcgctgaacgggttgaaaacatcaagaaacaaattgctgaaacaacatcagactttgaccgtgaaaaattacaagaacgcttggctaaattagctggtggcgttgcagtgattaaagtcggtgctgccacagaaacagaattgaaagaacaaaaatatcggattgaagatgctttgaacgcaacgcgtgcagctgttgaagaaggctacgttgccggcggtgggacagcattaatcgatgtgatcgaaagtgttgctgcgcttaaagaagaaggcgacgttcaaaccgggattaacattgtgcttcgtgcattagaagaacctgttcgtcaaatcgcaaccaacgctggtcttgaaggctcagtaattgttgaaaaagttaaatcacaaccagttgaagtcggctacaatgcagccaacggcaactgggaaaatatgattgaagccggcatcttagatccaactaaggtgacacgttcagcattacaaaatgcagctagtgtggcggccttaatgttaacaactgaagcagtggttgctgacaaaccagaagacaacccagcaccagcagcaggcatggacccatcagcaatgggcggtatgatgtaaagaagtgcgtttgaaacgggttgattctgagcattaacagtaaaacgagcgttatggcggtttttgccataacgctcgttttgtagttaagcggaagtcgttataaccaaaaagcacgattaaatccaaagttccaaaactggcaaaagttttggaacttttttatttttcaaaaaaaatgcgcatatataaattgtgcacaaccctattaattaattttgattgcggtataataatagttggaggtgttgacaatgatttttcgaaaccggcggatactgataacctgtttaatgttaggtggcttctttttagcgcgaccacaaacggtccaagcaacgcctgaagaaacgcaaactgccattaagacagcacaagatcatctatccgaattgaataataatattagtaatttaacgttaaaaacaacgcaatgtctacatcagatattagttaatcacttattaagttaaaactcataagcaacacaatctatcttatcatgtataaacccgaatgtcaacaacttttttaagtaatattcattcaacgttttgctacatgctcatctctcgacgacatagaatatcttaccatcctagtgggacaacgtcaatcactaatttgaaaaaaattcaaaaaaattgaattcctgtataaatatcgaaaaaataattcatatcacccggattctcatccctaatctgcgctattgattatccctcataatacttttaaactgctatttgttccaattttatccaaattggtataggtaaacaaaaagatcctgcaaaattcgcagaatcttcacgtcctaatagaagtcttctaggttttcatagtctaatatcgcaatctttcgaccgtttcgttcaattagcgcatgactttctaactgttttaacttacgcgataaggtttcaggcgttgttccaatatatgttgccagttcttttaacttcatcggaatcatcacttcagtttctccgctcgctttagctaaatcaagtagataagtcacgattctggattcaactgactcgatattgattaagttcgcctgtttttccaaacgcgtcatcttatcagtagttgcttctagtaactttaaactaatttcgggataggctaacagtaactgttgaaaatcactccgcgataacgtacagattgtactatcttgcaagacctcaccgtacaacggctcatcttccgttttaaaaagtaacttttctccttcaaaatcaccgggttccatcatgcgtagcagttgctctttgcctgctgtagagagctgatagaccttaatgctccccttagctaagatcactaaccgcttctgatccatcgggctcatcaccaacgtcccttttttaacgcgttcatgatgggtaactgccgaaatcttgaccaaactatcacggtctaaatgattaaaaatcggtactatctcagcacaaatatgttgttcgtcagtcacctagcccacttccctctatcttaatcgtcgtcttcttcatctaatccttcgcgcgctgcttttcctagttggctttgcaattcacggatttggtgttggttgtagcccattaaagaaaccatatccgccgctaaagcaaatcgttcttctttttccgcaagtttaatcgcacgggaaacaaatagattagcagtattatagtccgcaaccatttccgcaatcatcgctggcatctcccagtacttaatccgcggctcttctgtcagcatcccatactcggtatactcagcttgcgtcgtcggaagcacttcaccttcgtctagtagccgttcggccgtcttgtctaatagcatatcattttctgcaagcaatgtggttaattgcgctttaaaagcttggttattgattcctttagcgtaccacttcatttgacggagtttacgccgttgaatcgttaagttagccatcacatggccgatcatggcacccgcggttggtgtatggtgatcaacatcagcttgtttaacttctgcttggtaacgtgtttcgatttcttcattagataacatattaattgccccctatttcactttgatactttgaacgctgtagcccaagtcagttacagcttgtgttaattcatctgggtttgtcacggcttcatcatattctgctttcactttactagcattaaagagaactttcactgattcaaccccatcttgttgactgacacccgcttgaatcttttgcatacatgacggacatgatagctcgtctaattgcatcaccaattttgccatttcaatgaccaccttttcgtttgattactgtcactatatcgcgcgctgcatgattaaaaattgaccgccatcaagtttagcgaactttaaaccgaatcaggcgcatcgcattgaaaatcacgaccagaatactaatctcatgaacaaacatcccactagccatctgtacccagccaagcatcaggccaagcaataacaatccgaccgttccaacagcaatcacaatattttgaactgtattacgtgccgtcgccttcgtgaggtaatcggcatacactaattcggataacgtcgattgcattaacacaatatcggatgtctcaatcgcgacatctgtcccagagcccatcgcaattccaatgtcagccagtgcgagcgaaggactgtcattaatcccatccccgataaaagccactttttgaccgtttgcttggtaggtcttaatgaattcaaccttctctgccggcaaaagattcgcgtggtattcagtaatcccgacggctttggcaattgctgcggccgtctggtcattatcgcccgtcaacatgactaaatgtttaacgcctgcttttttcaaacgcgttaatgctgccttggcttccggtttaaccgtatcagcaatcccaattaataaaacaacttgttggtcaactgcgactaacacggttgattgccctgctgtttgactggccgtgatcgccgcaatctgcgcaccggttaaccggatccctgcttcagtcatcatcttggcccgcccaatccgaattgtttgaccagcgacttcagcttgtacccccaaccctttgagcgtttcaattcgttcaatagttggtaagtctgtcacccctcgttcccgtgcatactgcacaatcgcagtcgccagtggatgatctgactgtgcttcaaccgcggtagtcactgccaacgttgcttgttctgccgctgtataaaattgcacatgtgcaactgccgtgtcccctttagtcaatgttccagttttatcaaagaccatcgtatcaatgccagccatcgcattaacgacttcgccgcctttaatcaaaaccccatgcttcgcgccattgccaatccccgccacgattgaaactggcgcaccaattactagcgcacctggacaaccaagcaccagaatcgtaatcgcgagtttaaagtcgcgcgtgattaagccaatcgctaatgccaacactaaaacggccggtgtgtaataggtcgcaaaacgatcaatgaatttttccgcgggtgacttactatcttgggcctcttcaaccaattcaataatttgggcaaaagttgtatcatccccaacctgcgttgcggtaaccgtcaatgtcccgttatccacaattgccccggaataaacagcatcacccactattttcttaacgagttgtgcttcgccagtgatgctagcttcattgacataggcactaccttggacgacttgcccatcaaccggcacctgagcgccagctttaaccaatacttgatcatcgatttcgacatcatcaacatctaccgtcgtagtagtgccatcggccgctaacacttgtgccgtttgtggcgccatttcagacaatgcgcgaattgattctcgtgtctttttcaaggttcgttgttcaagatagctcccgaataaaaagaggaacgtgacaatcgccgattcattgaactcaccaatgattagcgctcccaataccgcaatcgtgaccagcaaatcaatgctgatgactttcacttttagcgcttgatacgcctgcatcaaaatcggtgcaacccccatcattgacgcaaccaataacagcccttgcatcacaattaccgccccaccaagccagtaccagccataggccactgcaattaatccgccaacagtcagcgcaatctggttcttcacggattgtaaccatctttgaaatttcatttaaaatcccttcttcctaacgattgtctttagtatagaagaaagccgattttaagaacttgatggttatcaagtttacccgaatataacagacaaaaaagcacaatcaacgattatttcgtcgattgtgccttttcaattcgattaggcttcaaacccattttgatcagcgacttgcttgaaccaatgacctgattttttaatcgtccgttggcaatcatggtctaagtccaccgcaataaaaccgtagcggttcttataggcgttggtccatgaccagttatccatacacgtccacatatgataaccgagacagctactcccttcttggagggcttgatggacatacttcaaatgatcctgtacaaattcaatccggtagtcatcattaatctggccatccgcattgcgataacgttcttcgccttcaacgcccatcccgttttccgaaataaagcaagcaatgttgccgtagttttcgcgaacgtttttcaaaatatcgtaaatcccacgttcgtagatttcccacccgcgatacggattgactttcttacccggcatatcgtaattgtcgaaaaaatcattcggcatcgggccgtttgtatggtcgattggggtttccttggccttcacgcgccgtggttgataataattaattcccaataaatccacagtattcgccttaatcactgccaagtcagctggttgatagtcgggtaagatggctagatcttttaaaatcgcgaccaaatcagcggggaattcccccttcacggcaggatctaagaatgaacggttgaaaaaagcatctgcaatttgtgcggctttcacatctgccggattagtcgcatcccggggataacttggggttaagttaaggataatgccaatttgtcccccttgattgcgtgcgtgatatttttgaatcgccatcgcactcgctaatgtttcgtgataaccaacttgtaccgcatgcgctaaattaatttcagctggataatggaactgatataaatagccgccttcaaccggcacaatcggttcattgtgtgtgaaccatttcttcacccgatccccaaataattcaaaacaggtttcagcataatgaacgtaagcatcaaccgtctcacgattgagccaaccaccttttttctggagtgctagcggcatatcaaaatggtataaattcataaacggttcgatgccgtttgcgattaattcgtcgatgtacgcattataaaaatcgacagcttgtagattaatctcccccgtaccttgtggaaacaaccgactccattgaatcgatgtccgaaaactattgtgtcctgtttgtttcatcaattggatatcacttttgaattgttgatacacatcagaggtccgcgctgggcccacttggttaaaaaacttttctggcgcttgttgataccaataatcccaaatattatcgcccttaccatcaccgtcaatccggccttctgtttggggaccacttgctgctgaaccccaccaaaaatcctttggaaagtcataaaaagtcatcgctagcactccttcttgtttgaatagcctcagtatatcagcttctttttaaaaaaccaactcttttatttaaatgtctagactttttaaaaagagcgtgctatattgagaatgtaatcgattgcaaacacatgtaaaggacggtgctctacgtgaatacttttatggacacgcttagcaagaaaatcatgcctttcgcaaataagttaggccaaaatcgttacctaactgttctacgagacgcatttatgctttcattcccactgacgatgtttggatcaatcattgtcgttatcactaacctgccatttttcaacgatgccaccaaagcgaccctaacggaactccttggtaatggacaaaatgccacaatgtcaatcatgacggtcttcgtcacattcgggattggttattatctttctaattcatatgatgtggacggaattttcggcggtgctgtttcattcgccagtttcctaatcctcaccccattcatgatgaccaccgataaaggcgttgacgttagcggtgttttaagtctcgatcgacttggcgctaaagggatgttcattgggatgattgcggcatttatcgctgcagaaatttattgccggattactaaaaaaggctggcaaattaagatgccagacggtgtcccacctgcagttgcgaaatcattcgccgctttaattccagctattttaaccttaaccattttcttagtcattcaagcggcagtcactggtttattccatgttaacttgcacgacgtgatctatgaaatgattcaaaaaccactcgttggtttaggtggcagtcttcctgcaaccctaatcgcattgttctttgtccaattgctctggttcttcggtcttcacgggcaaattatcgtcaactctgtaatggatccgatctggaacacattaatgctcgaaaacttggaagcttacaaagctggccatgctttaccacatattgtcacgaaaccattcatggaaactttcaccgtaggtctcggtggttctgggatgacattagccgtcgtcttactgatggcctttatcatgaagaaaaaacaataccgcgatgtcggacgtttggccttggcacccgctgtcttcaacgttaacgaacctgtcattttcgggttcccaatcgttttaaacgccacaattttcattccatggctgattgcaccactgattgtcacagcgctcaactacactgtaatggcaatcggattggtgcctgcgccaactggggtttcagtcccatggaccgtcccaatcttcttcagtgggatgctcgcaaccaactcagtactcggcgggatcttacaactcattgacgttgtgctagtcggtctcatctggttcccattcattaaaatgctagatcgccaaaaagatcctctcgcaaactaaagattgttttaccccgttgtttccactaaactataagtagaaagcggggtattttttttgccaaaatacgaagaaattgccaacattattcgacaacggattaaacaagggcgctatcctgctaatacgttgttacccaatcaaaccgacttagttcaagaattcgatgctagtcgaatgacgatcaaaaaagcaatcacgattttaacgatggaaggactcgttctatcacgacgcggcgctggtacaaaggtgttagaccactctttttggaataaatcaacggcaccagcggatcaataccgtgggatgtcacgcgacttagccgacattggtaaaacactctcaagtaaggtcatcacgtttgaggtgactttcccaacgcctgagattaaagagcgcttaatgcttgctgatcaacagcccgtctacaaaatcattcgactgcggattatcgacggcgttaatagcgtcctcgaacatacctacatgccagtgagtctagttcccggattaactgatgatgttctcgcacagtcaatctacacctaccttaaggagaccctacacctcacgttcgcgggtgcctttcgcaatattcaagccgacaaggccgatgaatatgaccagcaatatctggactgcgccccaactgatcccgtcttagaagttgaacaagttgtttatctcgataatggccaaccgattgaatactcaagaagtcgcaaccgttatgatcgccgcggttatacattcttagacgttaagaatacttaattgcactaaaaaaagcctgccagcatttagctgacaggctttttctagtgattatttttcgacatcttgtaatttttggttgtcgtctaattgtgagcgaccaccgttgccgattttttgtaaatgattcattcctaaccataatagcaagagtgctacgacgatgaaggctaagagaacaaagaatgattgaacaatttgaccggtacctaaaccagatgtaattgcttctctgagccctagaattgaatacgtcattggtaagaatgggtgaatgacgttgtagaagtggttcgtgatttccattgggaatgtaccacctgaaccccctaattgaagcatcaagaggaccattgctaagaaacgaccaggattatcaaatgtcattgataagaacataatgatcgacatcgaagcaagtgagaaggtaattgccattaggaagaattgtgctggatgatcgacgtttaatccagcaaccatcattaaggcaggttcgataattgccatcccgacagcgactaaagcgccaaccgtgattttacttaagaaccatgctgttgatgattgaccagtcattgagatcttccgaattggataagcaaagttgaagacaattgcgccaacgaacaatgctaatgaaagaacgtaaggtgctaaagcatgaccgtagttaggcacatagctatagtttgaatgtttcaattcagcaggtgcagcgaacatatccgctgtcttattcgttaattggatatcgttaacttgttttgcgccacccttaagggcagttgctaatgtcttgttaccatcagttaactgaccagcaccgtcgtttaacttagctgagttagcagctaattgacttgtaccatcggctaattgaccaacaccactcgttaacgttgggatcttagcgtttaattgaccaagaccaccgttcaatgtttcagaacctgttgccaattgactaacaccacttgttaattgtggtacttggctattcaattgaccagtaccagttgctaattgttttgaaccagcagctaattgaccaacaccgcttgtcaattgtggtacttgaccgtttaattgcgttgtaccagcatacaaggcttttgaacctgttgctaattgtccaacaccgcttgtcaattgtggcacttgaccgtttagttgtgttgtaccagcatacaaggcttttgaacctgttgctaattgtccaacaccgcttgtcaacgctggtaccttactatttaactcgtttgtcccatcacttgcttttgatacgccagctgtataggcgcttaatcctggaattaagcctagttgactcggagtcccaacaaggcctaatttaatttgtcttaagcctgcattgatagtatctgttgcttggatagcccccatatctgaaggtttatcactagttttagttaaacctgcgctaacagtttttaaaccacctgttaattcatcaattgcttgatctacgcccgatttaagttgaggtgctgcaacatataattcatttacaccttttttcaatgcttgaagacttgtcattaagttagtcatctgcgtttgaactgattttagatgtacaccagtatcttcagtattagttttaatcgtatttaaatctgcaccagatgaggcaagttgattagctgtagcagtaacactagtccccgcactttgaagtgcattatttagtttctgtgctaaagctggatcttttgataatgctgctttaatttgtggatcagaaactacttctgtaatagcttgtaattgcgcaccagtgttagcaacttgactagctgcacttgtacttacatttttatcatatagtttactattaatttgttgtaatgattgtcctgtacttgtagcatcagttgctactgccgttaagtctgttgttacttgttttgaaattgcatctgcttgtggactatttatccccgcgttaagtttctcaacaccagtctgtaattcgcccatgcttgatctcaataaatctaacttttctgatttactatctaactgatcatcaatcatattagcagcagcagataaggcgccacttaattgttgactaccatcgattaactgatcaacgccgccatttactttaccagcaccagcaactaactgatcactattactatctaaggcatttaatccactctttaattttgtaacgccaccggctaattgtccggtaccatcatttaacgtttgtaaacctgtgtttaattgaccagcaccgtcatttaaatctttagcacctgaagccaacgcacctgttttactatttaacgtttgtaaacctgtgtttaattgaccggcaccgttgttcaattggcttgcgcctgaagctaatgcgcctgtcttactgttcaatgtttgtagacctgtgttcaattggttggcaccgctgtccaattggctagcacctgaggctaatgcgcctgttttgctattcaatgtttgtaagcctgtgtttaaggcccctgaaccggctgctaatttttgaataccgtctgataaaggtgtcacgctggtcttcattgtcatgacaccatcgttgaccttatcaacaccagctgtataagtgttcaagccatctgaaagtgtgactgaacccttcgttaacttcttagcccctgaagcggctgtgctgaagcctttaccagctgttttaacttgtttgaacatgacttgagcataagcctttgtcactgtttcacgtacttgggcgttcaattccttggcacccatttcactgataacttccccgatgaagttcaatgaatcgtttgtttcatattggatttgcatctttttaggattcttatccaagactgttgcggcgtttgctgaaaagttcttaggtaaagtaacgactgtatagtattccttatccttcaaaccttgcttagccttcttggctgaaacgaaacgccaacctagttggtcgtttttctttaattccttaaccatatccttaccagcactcaacgtttcaccgttgtaagtggctggttgatcgttatttacgacagcgactggtagttcaccagtgctaccgtaaggatcccagacagatttcaggaaaaagacactgtacaagaacggaataaacacgattgcgattaacgaaatcatgatgattttattcttggcaatgaacttaaattcattttgaatcatcttcatgctaaaatctcctttaattatataagttgcttaattgattacattcaatatccacgataactaaattagtctaaccttttttcatttaaatttcaagtcttatgcgccaaactattctctattcacaactgtttctaatctaacaaaaaaagacggtcgttatttatataacaaccgtctcccttatggaagaaacaaatgacttcctattaaattaattattttgcttcaatcttcgtcatgccacccatgtatggtaccaatggttctgggattgtgacgctgccgtcttcgttttgatagttttccaagatggcggcaactgtccggccgactgctaagcctgaaccgttcaatgtgtgcaccaagttgacgtggccatcttcgtcacggtaacgaatttgggcgcggcgtgcttggaagtctgtacaatctgaacaacttgagatttcacggtacgtattttgagctggtaaccaaacttcgatatcgtatgtcttagctgatgtgaagctggcatcgccagttgccaatgtgatgacgtgatatggcaagttcaatgcttttaagatattttcagcatcggcggtcattttttctagttcattgaatgattcttctggtttcgtgaatttcaccatttcaactttgttaaattggtgcatccggattaaaccacgggtatcacggccagcacttcctgcttctgaacggaaagctggtgataaggcagtgaagtagattggcaattgtgcgccatccaagatttcgtcgcggtagaagttcgtcaatggcacttcggcggttggaatcaaagtcatgggttcgccttcgttagtcattgtgtaaacatcttccgtaaacttaggaaattggccagtcccaaacattgattcgccattcactaagtacggcgtgatcatttcttcatagccttctttagcatgttgatccaacatgaagttataaatggcccgttcaagacgtgcaccggcacccttatagtaaacaaagcgactacctgatactttagcggcgcgttcaaagtctaagatgcctaatttttcaccgatatcccagtgtgctaatggttcaaaatcaaattcacggggtgttgaccatttgcgttcttcacggctaaaactttcatctgggccaacgggtgctgaatcatctgggaagttgggtaagcggactaagatgtagtccactttggccttcacttcagccaattcgctatccaaagccttgatttcggccccaacattcttcatagcagcgatttgttcagtcgcatcttctttattgcgcttggcaacggcaatggcttctgaggcagcattgcgatttttcttcaattcttcggtcttcacaattaaggcacggcgtttttcatctaatgcgatgacctcgtcaatttctgcagcttgaacaccgcggctagctaacttatcctttgcccattggacattttctcgaatgactttaatatctaacattgcactctctccttttaatgatctttaattaacaacaataaaaaaagccttctcatcccttaattgggacgaaaagacttcaattcgcggtaccacccaagttcacccactacaaataataggtgccctcaattactgataacggccaggaaccgtgtagttcatcactacccactattgcgctggaatgctggattcaataccttccaccaaccggtatctctctgtcaatccatataggcgcttattcacgtgtttacttcttaatgtaagaataccgcatttaatctttaaattcaatcatcaatagatgatttttgaatccatagaccccgtaataaaccgagcatacgtccaaaatgatcgctatctgcattttgatgccatttaaacatcaccgcttctgggttaacgatgccagttaaatcaatgatcgaagtcgtaaccaccatatcagcatccattaaatccgcgtcagattgactaacatccgcatacaaaacactattcagtgcagtcatcaaaacaaagtacccgaggaaggattgttccgtcacaacgacaaccttcactttattcatcggtgcaaaccgttgaatcatctgacgcaagacgttgtagtaaccactgaccaattcttcacgtaatttgactaagaatgacactttcggattgattaataagtaatccaccgtatcatcaatattttgttttaggacatcatttggcttgagatattcaacactttccatcatttgggcagcgagcaccgatgtcacatcttgtttaaacatgtacgtggtcatcgtcatcgaaatcatcgtttacacgaaaccttgataattcgcatcgtctaagtttaggtatttcttgatatcaaacggaatttgatcaataaaagcttctacaaactcgtaaatcactggaatatatcgcttgtatcgcgtttcgtaagattccatgtagggattagcatcctgaatctgaatcggtccaaaattaatgatgtcatatatattgaatgattcagccatcgcttcttcttgggtcatttgtgcaagaatactcttgatccgtaaagcttggtcttcaaagggctgttttagatattcagaaaccatattgggaactggataacggataaaaccgccatctagttcagttgaaaccgtgtgaccttgtagtaatcggaaataggttacgacgattgaatacgcccctagttcacgggtcaaaatattgggtttttccaattggaaccgatcaatcgcaacatcgaacgccttaagtgcatcgtctcgtttaacatcttcaaagggccaggtatgcccttccgttgccatccagaataacatcgttaagactaaatgaattttattttcgtcgccttctaaccgaagtggatcataatacatacggatatcaaatgagcgaattaagtcgcgcaccccttttaaatggcgtagcgccgttgccttactcgtatcatgggcttcccagaattcttggaatgtaacggtctcacccttgagtaagattttgataaaatcaaacgcttctgacttattcactaataaatagtgataggcatctgttggaacgctgaacaaggttttaatatcatcaacatccggtccgataatttcctttaggtccccaataatgctcatgtacatattgtacaagctaccgtaactgcgatttaatagcattgctacttgtcttagattcacatcttcaacgagcggctgattattacgcgatagttcaatccgctttttaacaggcaactcatcccgttttaaaccaacaatctccattaataaggcgtacttatcattttccgcttgcgttagaaaaatactctcacttgcgttcaaaccgattccccctagtaaaaatccttataattagtaattaatcctaccataaattgtgcaaatagtaactattgcgttgtttaaaatcaaagattgctttttacgtcagaaatgctagaatatttaagtgacgtttggttgtaaaacaccatatgttgtatatcaataataatttaaacacattttatggtcaaaagagggagactgatgacattgctcgtacttgctggcacaattggtgcaggaaaaactagtttaactaaatatctatctgatcacttaggcactgaagccttttacgaatcagtagacgataatgaagtattaccattattctacaaagatccaactaaatatgcattcttactacaaatctatttcttaaacaaacgatttgatagtatcaaacaagcatatacagatgataacaacatcttagaccgttcaattttcgaagattcattactcttccacttgaacgctgatcttggtcgtgctaccgcaaccgaagtccgtgtctacgacgaattattagctaacatgatgcaagaattgccatttgctgcccacaagaaacgccctgacttattaatccatgtacgcgttagtttcgaaacaatgctttcacggattcaaaaacgtggtcgttcatacgaacaactagaagccgatccaaccctctacgactattataaagaattaaacagccgttatgatgcttggtatgaagcctatgacgaaagtcccaagatgcaaatcgatggtgacaaattagacttcgttgaaaacgaagctgatcgtcaaaaagtcatcgaaatgattgacgaacgggtgaaagccttaaacgcagaacaagaagcaaatatgggtgcctaattgcacaaaaaaagccgttcgacaaattgtcgaacggcttttttattatgcttgggtacctttttgcatccataattcatgaataatgccatacagccgggcatagtgatcgctactagcatttaagcgccacgtaaaatataacgcctccggattaacgttttcgggtaaggcaatgctcgacgtccgaacaatcaggtctgcatcccgtaaagcttcatcggtcgtactaacagcgacatatttgatattatcgagtgctgttaagatatccatatagccaatgtaatcttgctcaatcacgagtgcgaccttcacctggcttacaggatgatactgctggatgacttgttgaattaaattatagtaagcctttatcaaattctcccgcccacttgctaaaaaactaaaagctggttcgaataagaggtaatctacggtatcactaatttttttatggagtagttcattgggttttagctgcggcatacgaatgactaattcattaaaaacgacagaggtcgcgtccatcccaaggatataggtcgtcaccgtagtcgttaacaacgcatttttgaaaatatcatatgtgtgctgcgaaatctctaactcatgcataatatcaaatggaatacgctccaaaaaggcagtcacaaaacgatgaatttctggtatataacgttcatctgcccaatcagcagtcaccttagtacttgttattgagcgtaacggtactggacaataccgtaacaagaagaatagtccagcggcttctgaacgcccttccgttaacgttaactctgccaaacaagttcgtaatcccgttgattctttagtgaaatcggctgcaagtaaatcactgattaaattaggatagggataccgaatagttgctaatttttcatcgggctgcacgactgcaccggccatcactcgataataagttactgccagaatcgtggcgccaatttcgtgcgttaataggttaggcttttgcaattgaaattcatcacagacatagtcaaaggccgacaaaacacattcgtgattgatttcttcaaatagccattgatgcccaccagacgccaaccagtataaggcggataagaccaatcgaattgtcttctcatcaccttccaaccggattggttcgtatgaaacccgtaagttgaaggcgcgggttagatcgcggacttgcttcaaatgacgtaatacagttgctttactactatcatgctctgctaagaaggttttaaacgatatatccccgccccgcaatagaatctgtacgaaatcatagatgtcagaatgttgtactaaatataaatgatagacatcacttggaattgcgaagagtcgcttaacatcatcttcctccgtccctaatattgcctgcagatccccaacaatactgacatacgtattgtataagctactataattacggtctaacaatgttgccacttgcttcaaattgacgtcatcgattagtgcttcgccctttttagccatgctcattcgttttttaatgggtaattcatgccatttgacattaataatatctaagaaaagagcatacttatctttttctgccgatgttaaataaacactattggtatccacattgcctaaccccttgttccaaataattgatatatattttaccatcaatcgatattaaagcataaccattctacagcgatatttgttgcgtataacaaaaggcgatgcgttattaacacacaccgcctcaaaagctgaaaataatttcgtcatcagctctaattaaacctgacacgctaataacttaaatcaccaattgccatttcaaatcagcattatatgggccaatctgataagcatcattataaggtagtgataactgtaactgactttgtttccaaccaactgtggttccataactcgttaaatcttgctcactgattggccgctgtagaatcccatcaatccattgattatcgggtgactcattagttaatgcttttgcatcactatcatttaagcggtatttaaaattttcttgcatataaaagggattatcgggtcgttgatttatccccagatagcctagttgtaaatcaaaatgactacacaacggattacatacgactactttcggcgcttttggtgtaccattatctgccacttttagttgtacacttggtacctcatttagcgcaatcgtccgattagtcccccctactttgacccaaaatttcgtcatcaaacgtaattgttttcgggatgccaacttctactgccccgtttaaagttaatttgaattggaatttatcaattggatttaaatcatcatttgcaataggtgcacttgccgccttttcagacaacgcaaactcaatgtcgcttgtccgcatgacatcacaatgcagcccttgctccgtagtagtcggattccctgtctgattctgactagcattaattagctgtgccataaagctctccgataaatggaactgcgaatcggttatcaccggttgccacactgcattttaatctgcattaacacgatagtataacccaaaagaatcaggcgggttaactaggtcgacttgtcctgtaatcccgtactgcggggccgcatgcagtgtgccatccgcataattaaactgcgcatggccattcgattttacagactgtgcatttttggcacccggatcagctaatgtgacagagcgaatctcaggcacctgaatgcctggaaaatcgtggccctgaccaaaaacggctttatcatgattgggtgaaatcggagcatcgggtatgtagactagttcacgaataatactttcaagtcgcgattaaattcagtatactaaatttagataaacaaacttactggaggatagtattcatgcggacttggcaaaaatggactttgattgttctgacactcttcttaatacccattatgtattttgagaaccaatattttatgagagagcagtttaaacagtcgcaaaagaatatgcagcagtcaactttaagtgattttaatgaccaagcaagcggtcagtacgcggcctttaaaatctacgctgtagccaaaccgcatggaaaaatctattattttgtcccacaaaaccaaaatggggccaatatcgatttacaaaaacaagaagtcgcactcggtaatcagctttatgcaaaagcacacaaagaatcacccgacattgaccatatcacgttgtacgtcagttatactgctaagaacttgcaagacaatacgtatgcttttaagccaaccgccgaggcttatggttttgtaaaatcacggtttaagacccgttatcaacgcttattttcacaaactggaactgaagccatctatgatatgcagcacaatacaacatcggtttcgtttaaagatttacaaaaagatagcacaacaattccgatgattcgtcaacttgcaattaaccaacaattacaagcccatgattatacccccgaacaacttacacaattggaagcacttgatttcccgggaaatgatcaagcaaccaattttgactttacaacagatggtctaacattgaaattcgcaaagaatcctcttgatattgaaacaattgccctgccaatggcaacggttggtccatacctcaatcccaaccttgtcccagaagacaatcaaatgccttccaaaaaaggtggtgctaaaaagattgcactcacctttaatacgacattaaaacctagcactattacgagtgtcattaatcaactaaacgatttaaacatcaaagcaacttttttcactactggtaaagcagctaaagaacatccggatcaactgaagcaattactcaaagctggccatgtcgttggcacccaagcgtataacaacgatgatgacttggatacaatgagcgcgtcagaaattgccgataacctcaagcaaaccgatgccgcctacttcaaagccagtggtcaattgccacacttattacgggtcacaaccgaaacccctagtacggaattaacaaccgctgctagccgggcactaatcgcttggagtgttgattcggaagattggcgcttagatattgatgcgccgacaattgccaaaaatgtaaatgagcgtattacaggtggtgatcttgtcctactgcacacaagtgaggcaacgattaaggcattacccgcaattgctaaagaacaaaccgctcaaaaacgacatttcgtgacagtcaacgagctcttcaagcaacgattaacaccttatcaacaatatttcaaagctggtgatcaacgctcgctacaataacgcaaaaaggcccgacaacttaaattgtcgggcctttttgtaatctaaacgtgctccgtaagccgcacgctatttatgttttgataaatcaacttcttctagtggaatcatcttagttttgtaccgtactttatagtaaacatatagtacgacaaacaatggaatgctcatataactaatcccaatcgctgtccaatcgaagttcttaaaggcttgaatatcttgccctgcaatcaccaataaacaaagcacgaatgcaaaaatgggaccaaatgggaaccaacgtgcatgatatttcaattcgctcaactgatgaccttgtgccttgaacgcacgacggaaacgataatgtgacacagcaattcctaaccaagcaataaacccagtcaacccactagctgccactaagaataaataaatccgagttccaaaaatacttgtcacaaaggttaaagctcctatgattgttgtaccaatcagtgccattactgggacgccacgtttgcttgtcttagcgaaaattttagctgcatagccatcttcagccattgaccacaacatccgggatgaagcgtacatccctgagtttgccgctgataacactgatgttaagatcactgcgttcatgatgctggctgcagaagctaacccagcccgtttgaacactaacgtaaatggactaacagcaatattcgtttcactcgcgcccaacaatgagtggctatcataaggaattaaacaagcaatcacgaagattgaaagaatataaaatagcagaatgcgccagaaaacttgtttaatggcctttggaatactcttttctggggtctttgattcaccagctgtaatcccaattagttcggtgccttggaatgagaagccagcaatgacgaagacactcaacatcattggtaacccaccaacaaatggggccttcttataagtgaagttactcaagccagtatgatggccacccataatcccgagaatcgttagtaacccaacacctaagaaaataatgaccgtaatcactttgattaacgcaaaccaatattccgtttcgccgaatgatttaacactcgtgatgttaatcaagaaaattaataatagtgcgactaagctaaaaatccaccctggcatatcaggaagccagaattccgtaacgagtgccgcggtactaatatcaaccgccaacgtaatcgcccagttaaaccaataattccaccctaacgcaaaaccaagggctggatcaacaaaccgcgttgcataggttgagaaagaacctgagacaggcaagtacgttgccatttcacccaaactggtcatcaagaagaagaccataatcccaatcccacaataggctaacaatgcaccacctggacctgcctttgcaattgctgaaccacttgtcacaaacaagcccgtcccgatactaccgcccaacgcaatcatcgaaagatgccgcgtctttaactcccgcttcatttcatttcctgccataatacttcgctcttttctctatgatttcaagaaaaagccccaaccacgttctagcaaacaaaaaaacagtctttttgtctgctaaaaacgacaaaaagactgatagccttataatatccgttgatagcgccccgtaacatttcgttacgacagtccttgatttattcaaccaagtcccaacatcaaaatgaataagcaaattgacatttcggcaaattcccctttaattatccctcattactgcttagtcagttcaggataacgactcatggtttttgcgacctcttatcttgttagaaatgagtatacagaattcacacaaccacgtcaattatttccattaaaaaactacgattatttcaatcgtggttttcattttgcttattgttctttatctttgcgtgatttccgccataaaagaattatcaatagtaggataatgacatataaccaccagttattgttctctggtaattcaacggccttatcgttatattttgcaacttcctgacgggtaatctcgcttagtattggttcctgtataatcaattaatccattttcattggttgtcgctgtcgtaggggtcacatcgaccgtaattggttttgttccactattttgaacccgcacaccaacttcttgttttcgaccaggagtaacttttaaatcataatagcccaactccgtatccgtttgattatcaggatagacgggcgtaaccgaataagtcactttctccgcctgaactggttgatgactaaccatcaacatcaggtcaaaagtggcaaccaccgctaataacaatccaaatcgttgcttcattcgtctcattctattcgctactccttctaattcagagtacgttttatgtaataaaataataagttttcagcaaatatatatttttaattttggtgttaattattttcttcactattaatcttaatcctttgttaacaagtggtacggcgttaattggatatgccattgtccattttttaaataaattcttaattttctgaaactatcaactaatcaattgaaaacgaattttcaatttcagcacaaaaaaagcaatccaacgatcggattgctttcactctattttaaatttttaatgatcttctggatgagtaattcacgttgttcggctgattgattccaatcaatcactggaatggcttggtgcccaattgtctcaataatcaagccagaaacagtttgccgttttaactcgttcgcccatagcatgtccgccttgtggaacgcagcgttaataatcaatgttccttgtttagcaacgggttggaagtcattgaagaccgtatccaacttacccgtatctggataagacttaatttgtccttccgtggccaacacaacatcgtagattgaaacttcatcagctggccgcgctagtgtaaaaccaccactattaccagaagccgatttcactagcccagccactactaacttacgaataattttgcgtaggtaagtctgtgacccgcctaagcgatgatgaatgacttcagacgaaattgtgtgttcaggatcttgcgtcgccaaaagtacgataatacaagttgcttgttcaaacgcccgtgttaaatgcattagccctgtcccctttttaacagtcgcgcactacgcctttcgcgtcttaatgaatgaaccagaggattgacctgcgtcggtttgtacctcaaacccatatttttcaagaatgtgtgcaactttcttaaaatcatctctatcgaacgtactgatattaccatcaattgtttcaatttccaacttattcgctaaattacagaaggctttcactgccaattgtgctaaaccaagattttggaaatcataaacagctaagcgtgaagctgctcccaatgtttcaagaactgtaatgtgcatttcttttttccatttattggtttcaaataagagttgtgcttgaaaatcaaccgttgaatgtccaaagcggtcgacgttagcgtatggtgtgtagacaaaaatcgaacttgtcgattcttgttgaccattttcgcgatagtctgtatagacgatgtactgcttaaccttttcatcattaacctgattcatacttgatagaatcgtcaaattttcgtttgcctcaatttgcgctaacttccgtgcataggcttggtcgttttcgtttgccatttgattaacccccatttgtctttcaaaccgattataccatagctttctcatttaaaccgtgatttattacggttataaccatgttatttttacaatttgaaaacgtccactattcggcggtagtactgaactcgttgcccgcctaaataatccggtagttgtgattgataagtcttctcgaactgaactttctgtaaactcgcttgcgatgcttggttggttaaaaagcaggccgcattaaaggtgtttacaccagtttcttgcgcataggcttgcatcgttgccggcaatactgcgctgataatcccacgtcgttgatacgccggtaagatggcaaaactgagttcatatgccgcgactgattgtccatctacactaagggtaggggcgagcattatcaatccttgcaccacctgcgttgcgcgatcaacaatcgcccaagcatcctcatcattcatcaacattgttagaaacgactgcgcttcttgttgagattgaaaagccgtcatatttagctgcgtcacaatcgttttttgacaaccaatttgatagaccacttcaagatccattggttgaaaatgccgtagttcagttgtggcagtcctaatctgcatctggaacaactcctttgtcatatcaacactcatagtaacccacttacagtgttccgccaagtaaattcttatgtttccattaaacaaaagcgccaaagttgtggtataccactttttcagtttatactaataacgattaattactcttgtagaaagcgagcataccgatgtcattccgcgactatttccatttattttcgaccgtttctcaacaagccgaatcctatgattattttttacactttattgagacacctgttcctgatttacaacggtatcccgaattaactaaaatttgtgattgggccgcttatgatgatcacagttttcgtctgtggacaagcttgcccctcgacgaattcgagcagcgttttgctgaaactgtcccattaccaagcgattcttaccagttagattacagttacaatttacaagatacaaattttttctaaagttcatgcttgacttttaattcgaactaccgtaaattgaataacaatcataagtcatcttaattcaaactaagtagtgcattatctgggtgtcagaaagtcggtggttgctgcgaaccgatcagggtaattgttacgaaatactgaatggatgattcggctaattaacaggaccgttatcacctgtaagagtggtgtgttaccttaaaataacacgttaactgggtggtaccgcggtttccaatcgtccctattcgcatcagcgagtagggactttttttgtagagtgcgtgatttagcgcttaatatctaaacatttgcatagaacattgccaatcaaaaacacatttcaactatggagggattttcatgttcaagattgcatcgtgcgggggaatcctccgttatcagtcttttgtcgcaccagcctaaccattaaacttaaaaggatgcgatttaaatgacaaaacacaaaactagtttattagaagcaagtatcgttttacttattctgctagccatcatgggtagcggcgtgattgttttccaactttcaccacaaacacccgtcttaacggcgattgccctcttgattctatgggcccgttggcggcactttagctgggacgccattcattctggtatcgaagatggtctcaaaagcggaatcattcctatcattattttcattctcgtcggcgccttaatcagtatctggattgccgccggtgtgattcctagcctgatggtctggggcttcaaaatggtcagtgtccactggttcattccctcgattttcgtcgtctgtgcgcttgtcggcagtgccatcgggagcgcctttaccgtcatttcaaccgtcggcattgctttcttcgggattggagccacactcggactaaacactaccatcgtggccgcagctattatttccggggcaatattcggtgataagtcatcgccactttcacaatcaacaaacttaaccgcagcggttactgaaacagatctatttgaacatattaagaacttgatgtggaccacggttccagcgtttgttggctcattaattttatacgctatcattggccacacctcgaaaaatgtctccctcgataaaattggtgcgacggttgctgtcttaaacacgcacacttcagttagcctacttgcactaattccaatcatcttaattttcgtttgtgctcgccttaaaatgccagcaattccaacactctttttaaacattgccgtttcaatcggtttaatctttttccacaacccacacacatcaattgctaaaattgcgagttacattgaaaatgggtttgttgcccacaccggcgataaaagtatcgatgccttactctcacgcggtgggattaatagcatgttaagcaccgtcgccttaattatcttgaccttaaccctcggtggcctcttaatgaagcttggtttaatcgaacgcgtgatggcccctcttgctacccatcttaagacgccaggtcaattgatcagcgccgttattgcttctgggattggcgttaacctctttatcggtgaagaatttctttctgtgattctccctggtaaagccttcaagagcacctttgaaaaatcaaacttgagtaatcttgctttagggcgcgcccttgaagatggtgggacagttatcaactacctcgttccatggggcgtcgctggcgtttttgccgctaatactttaggcgtccctaccttgagttaccttccattttgtttcttcagtctcttatcaccaatcttctcaattctcagtgccgttactggcatcgggttaaagagaaaaaccgcctaaacacgcaaaaaaggcccaggataaaatatcctgggcctttttttacattaattgcattaggaattgaccgccatacaccagcgcaaaactatacactgcaattgaagctggcttgcataaaataatgatccatgtaaatttcttcaatgacatctcggtgagcccagccatcaagcacaagacatcgtctggtgcgaccggtaagaaaatcgcaagtgcgaagaagcgcacaaagtttttcttttccgtaattgtcccgatatacttgtcatacgttttttcactgatgacgtgtaagatgaacggcttcccaaattgtcgtgctaataagaagttcaagatagaaccaattgcaatcccgacgtaattataaacaaacccccaaagtgggccgaataccaaaaccccggctgcggtgctaatcccgcctggaatgacaggaatcacaacttgaataatctgaatcgtgatgaaaatcagcggaccaattagcacagagtgccccaaatacgcctgcaacgcggtcgtgttattaaaaagaccaagccgagaccaataaatagccaatgagatgcttccgattaatgccatgagagacgttgcgctgattaagcgtcttgaaattgttctactcatccgctgaattccttccaaggttaattttaattataatttaccacattcaacattattttttatcggtcgctagtctgatttaaaaaagcttaactttctaagaacgtccgaaatggtttcaatccttgtgcatgatatttttcaacaaaggccgctacttctgctggatcctgtgtttgatcatcaatcacgagttgttcaacgggtaacggacgttcgttagcaattttaacatcaatcacaacaggttccttcgtgcctttagtagcagcaaaagcagctttcaattcagctaatgtccgtaccgtaaatccttttgcgcccatcgctgttgctgctgcaccgtaatctgccccttgaatggcaacccctgagtgtggttgacccttatcatcttgttcagcttcaatgaatccgaatgaatcgttgcttaatacaacgttgatgattggcatttggtatttaacttgcgtgataatatcttgcatcaccatcgtgaagccaccgtcaccactaatcgaccagatttgacggtcagggtaggcagcctgggtcccgattgctgcaggcactgcgcaacccattgtggcataccatgctgataacgtcatacgttggcctggatgcattttcaagaaacgcaccccatcgattgaaacattcccaacatcgagattaaagatggcatcgtcagtggccatctcattgatttgtttgaagacgggttccacacgtaacggtgtttgatcgttttcttcaaaactggctttccattcattccagttttctttgttggcgagtgctgctttataaaaggcagattttttggcaactggttcactcgcggctagcaatgcctttaatgccgtcttagcatccgctaaaattccgacatccacatggtgtctgtgtcctagtttagtaggatcgatatcaatttgaataaatttggcatctggcttgaagaagtattgaccgaattcataattgctaccgacaaataagattagatcagcagcttctgccaaatcaactccgggtttcgtggctactcgcccagctgaaaccatataagctggatggtcatcggcaacaatcccttttgaaagggctgatgacatcattgggatactcaaccgatcagataaagcaaccaattcttcacccgcagcacgtgcaccctgaccaaaataaataatgggttgttttgcatctttaattaactgtaatgtacgatcaatatccgcgcttcttggctctggataattgcccatttggaataagtttgcagtggcctcgaagttatcttcaatcggttcccagcctaggttagttggaatcgtgacaactgctacgccgcggtgtttataggcttgttgaatggcttggtcgactacaagtggcatctgttcagccgtcattaccgtccgattatagactgccacatcagcaaacatggggttttcattcatttcttggaaataatccgtattcatcacacccgtagcaacttgtccaactaatgctaatacaggaacattatcatatttagcatcatagagaccatttaacaagtggactgcaccaggtccggctgagccaaatgtagcagcaatcttgccagtcgctttggcttcacccgccgctgctagtgcaccgacttcttcatggcgcacttgaatgtaacgcataatcgctttctggttatgtagtgcattcatcgttgaatcaaacgagccaccgggtaaaccaaaaatatggtcaattccccagtctgccatgacttttaacattgcatctgatgcgtttattttctgtgctaccattaataaagacctcctgatgattttatgtttcacttacttaagtataccgcttaaaatgtaagcgttacaaataatcctgaataattcatactttgttgcgtaaaggtaatttgccccttttaacgtttaatttagctcaaatttaatccgcaactatttttgagtgtatttgagctatttttaagacaattttatttttgattggtgtcaaaagagtaaactactcccttgatcgtacttaaattttttaaattgtcttttttaattactagtgagctgaaattcttgaatcctaaacaatgtttgccagtataaatcatcaaaaacattggtactagaaagatgcagccataatttacgtgcatgttgggtgactctgccggccaaatgaaagagcttgaaacgtaaagtggcgctcgttgcgttccctaattcagctgggaaaaccagttttttcatggcttgaactaagttataagccacaccggcgagtaacattctaaactggttagccgtaaaactggaactatccgttttatcaaaggcaaagccacttttaacttctttgatcagatcctccatggctccacgttggtgatagagttcaaagacgtcactggcaaaagccagctccaagttagtcacgataaattcgtgtttaaagagtagctcgccagcagggcgagttgatttaatgatcacggggtaagcgcgaccccaagtgtccggttggtaatctgtcaaacggtgccactggacatctttttcggcgaagtcttccccaggttgccccatatggatcaagtgctcggcgatccgttgtagttttggattagccttgagacggatcgtaaactttgccccagcttcttcacaggcggcataaatttctggcttggcaaaacccgagtcagcccggactagtacatctaaagcagcgtattgtttcagtagcggtttcaaaaaagcttccgcatttttggaagtgtattcgttacctggccgtaatttagctcctaagagacaacccgaaaaaccatcaaaagccaacaggggatgataaccgttcgtttgataatgggtgttaaaagcactgcctttctggtaaccaaatgtatcggaatgagtcgaatcaagatcaatgatcagttgacgttgcttcttttgtgtgatcactaactgcgctaacttggcgactaattttgtgatcccggccaagtcgtctgcggaaatttggttgatatagcgtgaaagagttggttgcgaagcaactaaattatctaaaacaagctcaaagctcatgtctgcggtcagtttattagcggcagtatcgtcgaaataacccgcaatcagctgaatcaacagttgtttaaacagctggttcttatggtacctatagaacttgcggttttccttaaaatggagagtttctttcaaaaggcgcttaaagtggatctgatgcataaattcagccactaaaattagacccgcatcgttagataaatgaccaccattattagaaagaaccagatttttgttgaagttaacggtttgttgttgtaaagtcgacatatggagcactcctgttctgtgttggttttggtcgacttaacaatagcacaggctgtgctctttttgtatacgcaattaaacacctaaaaggtgttggtttggatcacggacaaacaagatgataacaggcaaagaaagaaaaactgttaaagatatgaattattcaggattattattagtaaaaatatgactcctaacaagcaaccgcagccgatgttgaaaaagaagctcaaaacgctccacacaaaaaggacgcataatataaacaggaatgtcagcatcattgccacctctttatttgcaaaccacgctcacttttaccggcttagatcaactttttcattgatcagccacacaacaatgtcgccaattaaaaccacaacaaattcaccaatgccgactgtcaaatatgtcatccaaaacaaaacttcactgaccagatgtaattctagtgcgactgcctatgacattccggccccattgatgactataaattagcaatcaaacacccctcatgtaacgtttgttgaaaaccaccatagtattgagcagttctgacaaacgaaattgaatcggtctataactcaatggtgtaaaagcaaacgttaaaactacataaagtgcagcaatcaaaactgttttagtgatctcagcaactttattattaagacgtgccctttttaagaatctcctagtttttaggtgggatggtcacgaaccaccatgtaacaagtaattattccattaatactgtactttcaagtatagaaaaaagacgaccgtttatcaacctgaaaagcatgttataattttattattagacattttaacaaccgagtaactagtcgctaaaaatcgtggatcaactaactgtctagcctaacaaatatttgacacgacccacgaaatttatacaatgaatggatattactaatgaaaatcgctattttaactgacagcgctgcgatgatcagcagtaaagtcggatcacaaccgaatattagggtcttacagatcccactttcattggatggagaagcttattatcccaatgaattaccagaagttgctggaatagaaacgctaagggaagccacgcttaacactgtaacagaagagcagatccctctaaccacaatttctgcagtaaccgatgaacttcaacaagctggttatactgacgtactttgtatacatattgccagttcgatcagtggcttaggctcaaatctctctactttcgccaaaagctgtcaacagccgcttaagatccatctctttgattctcatactcttggtcctgcagaaggagcgttggttgaacgagcacttactatgattactcacggactaaaaattgctgacattttagcagaactaaccaagtatcgccaaaagcaacatacactggtcataatggaaaatctcaaaaacttgcgtcggatcggttctatttcaaataatgcacatctcttcagtaataatatgctgcattataaaaccttgctacatttttccgaaaatggtgaacttgaagtcttgatgaaaagttcacgcacgaaaaaaattgcaacggcgctattgaataagtttcgcagctctgcagcaaaaccggaactagcaatcgtggcagacaatacaatggtcttggaaaaatatgtttcttgcctgaaagaaattatgccgcaacttcaactagtaactgatctatattcaccttcgatattttccttcatcggtccacaagcactgatcattagtaagcagtgtttaagtggacgtatttcaatcaaatgaaagatattatatgatcatctcatcaaaaaggatgaggtggtttttttggaaaaaaaacatgattttgtggaagttaaacttaatggtcgttcacatgaaacaccaaaagtaccgcaaaaagcgctccaaattcggctggatcaaaataagacggctgtgatctataaccggatcaacaactatatcctagatgcattcttgaaggcggcgtttgaccatgatgcttgatttaaataaagttgaccagatctacttagtgtgtggcaaaactgatctgcgcaaagggatcgacgggttagtcggcgtggtcactgaacaatttgaattggatccataccgacgaactttatttctcttttgtgggactcgcaaggatcgcttcaaggctcttttatgggaaggtgacggttttttgctcttgtataaaagatttgaaaacggtagtttacaatggccacttgaccaagccgctgtgcgtaaattaacgtcatttcagttaaagaggctcttacaaggatggtctttagatgccacggtccatcaatatgacccccacaaagtttttgaagcctagcggacatatccacctgtgaatatctttttaaaaccctatccacagatttaaatctgtggatgctatttgcgtgggagcgtgttatgctaaaacttgtcaagataagccggagggcttattagtcatactggtgggtggggatagaaatggaccaacaaaaacagttcgcagcattaatgacacaagtcaaagaactaactgcacaagtgtagctattaaaacaagaaagccaggctaaagatgctcggatcgcagaacttgaaaacatgaacacatatctaactaaaaaattgtatgcaccaaagtccgaaaaatctgtcccggttgatgctaatcaaatggaactctggggagaaaatgagggtgtttttacccagtcagagcccactgacgaacaaagcacgcaagaaactcaatcaacgaaccaaaaacgaccgcaaaaaaggcagccacgtcaagcacaagtagctgatctacctgttaaagaaaaaatctacgaactgccaaacttggtttgtcctgaaggacagcctctgaaagtcgtgggcaaaaaactggtgtctagtaaattgcactttgctccggcaaaattatgggtcgagtatgaatatgttcgtacttatgcctgtgattgtgctgcttgttttgctaaaaaagcacacacggcttttatcaggccgacacacctcgaccgttgtttccacatagtttggcgaccccggcacttttggaaaatatcgtttatcaaaagttcgttttgggcaccccactttaccgtcaattaaaagattggcaccgcttaggctggcaagtcgcggagtccactctggcaagttggctcgtgcagggggcaaagctgatgacacccttgtataacttgatccaccaagaacttttgcgacgcccttatttacaaggtgacgaaacagtcattcaagttttacgagaacccgctaagagtcctacctccgaatcaaggatgtgggtcctgcggacagttcaaaaagcctcgcggccagggatctattatgcttacaagcccgaccgcacacaaaagtccggtcgggaactctaccagggatttcaaggtgttttgcagtgtgacggctaccaagtttatcatgcagtcgatcacgcagatcgagtaggctgtttagctcatgtgaggcgtaagttttacgatgcagccaaatttgactcacaggctaagcggcctttaaagctcttagatgatattttccggcaggaaaaagccgggacggagctttccagtcaggaacgccgaatttaccgccaacgtgaactccgacctttattcgataaattttgggaatgtgtcgctactttaccagtcttgcccaaatcaatgctcggaaaagcaatcacttatgcagtagggcagcgaagtgccctggataaattattagagtatggtgcgtttgatctctctaacaatacttgcgaacaggctgtcaaaaccttagtgatcgcacggaaaaattttctgttcagcactagtgtggcaggcgcccaggctaatgcggtctggttgaccttgatcgagagtgcgaaagccaacggcttagatcctgaacaatatttgattgagctcctaactcagatctcgcaattaggaccatttccaagtacagcagagttagagccttatttaccatggaatcaaaaacaacctaaaattgaaaaattgcttgaaaaaaacgcctgaagttcaaaccacgaacttcaggcgttttcttaacttcaaataatttcctagcgaaagctacacgtccaattcaacactgcttacgatcattagttggcaaaataattaactacatgcaaaaagatcgtccttcaatttaaagaagaacgatcttttttgtttgcagttctcttatattaactttttgctatttaataacggactcgcaattggccagcttctcagctttctgcttagttatctaaatcaaattgacccgtcagtttttgcaactgagcagcagtttcttccaaggtcgaaacatgttgggtaaactcatccatcgtagcttgcacttcttcagagttagccgaaacttcctctgttcctgctgcgttttcttgtgttgaagctgagatgctttcaagtttatctaagatcatcttttgagtttcactgatctcttttgtaccctcatggatcttttgaacatttgcacccatagcttcattatgcttataaacgttcattgtcgacttgatggcttctgtgatcaaaccagtctgtttttcactgctttccagtgagtctgttgttgccttgaccaaaccagttgattgctgtctgatctgttcaatgatcgactcaatttctttagtcgaatcattactttgttcagctaacttccggatctccgctgcaacaactgagaatccttttcctgcttcgcctgcactagctgcttcgatcgatgcattcaaggcaagcaagttcgtctgtcttgctatatcattgataacgttaatgatcttagtaatgttttgtacatcactatccatttcctgaacactgctcatcaaagcttgcattccgttgatctcgcttgaccagttaccattgactttgtccatgatatccaagttattttgcccaacttctgaagcttctttggatgaattagcaagctcttccatgttcgtattgacattatcaatatgtgcagtaattttttgaacatggtccacgctttcagtagtttcttttgcttgtgatcctgtcacttcagcaatttcagtgatcgtctgtgcgatttcttcagaagcagttgttgtttgtttcgaaaggtcaagtaatgatgcagcttgttcagaaacattcttggcttcttgctgtgtttgtccgatcagaacagtgacagaagcgatcatattattgtaactagccgctactctgttaaactcatgtccattcgcatcagctctggtcatcttttgagctagacgttctattggtaccttagaatactcgattttttcacccactgcaggcacgtaactcatcttaccttggccagcatctataaagaacttctcaagtattaataaagcacgtttgataaaacctgcactatagtaagatattatcacggctaaaatgatgatcgccaacattgagatcgtcaaggttatcaacatatgatgtgtttctgcgctcaaatcactattgttcatttgagcgatggtccaattgtcagttgtgccattgcccttgtcaaaggtaaccttattgatctgcgaacctccaggaactttgatcgtccccttctttttcgctgaagcagccactgctttataaacagctgtcttgttgatcattttacctgctttaaaagtattattgcttttaccagtgttctttttgatcaaaaccctgccggctttagttaaaacggcggcttgaccattgtttccgatttccatcgattcaacagatttttgtactgatgaatatgaaacagtaattgctaaaacatgggctttcccctgcttatctatgattttctgggaaacacttgcactatacgaatgattagccggatcttcataaggaattgaccaatatgcatgtcctgtaggtgctttttgataccaatcttgatctaaaatattcatatctttaggcaccgcaaaatttgaataggcatatgtaccatcagtattgacatacatcaagtttgtgatcgttccctgagcgtcgccattggcaattttcaaagttctgttagcgtcttttaagttgacattattggtcaactctggtcttttttccaaactagcaatttgtccagtaacatcttgccgcatgtcaacttgttgccgttgcaaaacatttacagccgtcacttttaaacggtcatttttctcaatcaattgctgacgcgtattcccatatgagatcaaattcattataattgccggtaccaatgctatcaataagagtaacggtaaaatatacttctgaatactctttttagcaacttttttcttatttgccattttctttccccatctttccctaactatctaatttgaccccctaaggatctcatgactatcgttcacaaaagtactgaagcaaacaacccctaaataatatgtttgccagtatttgcttttgcttgcgctgaagtcatcaaattaacgagcaattactgctcttttacccctttagccccactaaaacaaaatataactttaacgcagataatctaatatcgaggtttgcatgaccttagtccccatagccaaggtcgaacgatatgcaatcatttgattttgatattccatatacttctctgcaacatcaacatcttgtttattagacaaagtttctgctaaagtatttttctcagatttattccgagctgatgctgaacttaaacgattttcgatcgaaccgatcttagatctatagtcagtaaagttttcagtaaatttatcgatccctgacaaatattcactggataactttctatctgggtctcccgattttagagtatcgatcaaaccgctaaagaattcggtcagttcagacttgctatctttatcaatgccagacgaaccatcggcatgcatcaaacgtgaaccatcagtagctaaatctaagctgacaccatctgagatctcgcgctgtaaattatccacgttgcctctgtattctaaactgacagctgccccttcagcatctttaataacagcaaatggtggctcttgtgtctttgtccccccaaagatatacctgccatcatagttggtattcaaggcatcaactatccctgagatcgactgtgagatttctttacggttcgcattgtaaacggcaggtgtagttgtcccgctattagccgatgactcgatcaaatttctaatgttaagcatcaaggtcgaaacattatctaaagccgagtcttgcgtttgagaccattgagtggaatcagaaattgtttggccatacgttttgttttgtgaaatcgaaacattcagatctaagatctttgcgactaacaaaggattatcagaagccttattgacctctttcaaactagacagttgattcattgtcttttgaaccttgttagtactgatctgtaaattcttcaagaaatcagaatattccattttactggaaaccctcattgattaaacccccgttctattgatcaaagtatccaacatttctgaaacgacatttaacaatttggcattagcttgaaaaccttgttgaaatctgatcacatctgacatttcttcgttcaaattaacaccagaagctgcttgatctttgtattccaattgattcaacgctgataattgagcagatgccatattgtctgctttttgtttagatatcccattttttgtaacaatactgttgtaagcacctgggatcgttaaaccctctttagaattattgaaggtcaaagtatctttattataatttttcagcaaattcgctgtatcgaccggataaccaagcttactctttaaagctctagccatcgctaaagcacgtccattatctccttcggccggatcatcaccagtaccgactttcattttgcctggatctgcgactaaatcatcgttgatcttaatacttaaagccggatcactgggatcagtgatttcaaaaaagccgctatctggagtttgcccgtcagaataaacgatattttcaatttctacaacgcctttagcaaaatcatttaattcagctcgatggctttccacttcagccaatgattcttgcaaaccgccgatcgaacctgacttaactgctaacttgctatacttacctgaaccgttcgctgtttcaaaaacgacttctccgaccgtgaagtctccatcgatcgtttgctttggttgtgtttcatcaccatttggcaaaatctgagctttgccgtcagagttactgacaacaacatttaacttagtctgtactcctttttcattgtcaaccacggcatggtcaccgatactaagtgaagcacggccatatttgtcaaacgaaactgttaaattactttcagcagacatatcctttaataaactatcgcgctgatctaacaaatcattgggctgttcatcacttaaatgactgtcatacaactgttgattcaaattagcgagttgttccgccttttcattaaaatctagaacagttttcgccaaagaagaacgtgtatcagtagaaacttgtgaaacttgccgtgcagtttgctggatataagaagctaaagcaacacccatttgaacactattagttttagccgtatccaactcgggattgtcggctaacttttgtaagctgtcagcaaaattattcaattgtgtaatgagtccatcgtctgacggctcatgtaatgcattttctaataaagccaaaacatctgacttttggacgttaaaattgtaatctgaattagaatctcgaacctgtgaacgtacaaagtcatcaacgatccgtgagataccatcagcttgaacaccgctaccgatcaaaccgactcctgtttttgcataagggatcttcgttgataaatcaacacgttggcgcgagtaaccttcggtattagtattagcaatattatgactgctagtctgcaagccgatttggttagcatctaacccactgcgagcagtattcaaagtaccaaataaacctgacatgaaagtcctcctaaagaataacaaggtgaagtgaaccgcataaaagttgagcactatcggactttgacaataagtcgtggtttgcgacttgttggcgaagttggataggcacagacttttggttcacgcaacctgactaagaataacaaggtgaagaaatgcggttagaagccgagcattaacggactttaacaataagtcgtgcatttagcgactttttgttgaagttagttaagcacaagcttttgcatttcgtaacctgactaataacaaggtgaagtgaaccgcataaaagttgagcactatcggactttgacaataagtcgtggtttacgacttgttggcgaagttggataggcacagacttttggttcacgcaccccttctacaacctaaaatgactgatctacgattgccgcaggaatatcttctcgcttaggttgactttgagtcctatgctgatcaacataagtattttcctgtttttccaagctgtgttggatcgtatccatcatttttttctgataagccaaggcttgttgcgtcaacaataaattagtttcttgcaactcttggatttcttgaatcagcatctttgttttgtcgccaatttcaccagtatacttctcaaaaatcggtaagaaatcttccttttgcggaacaatttcatttagcgattctccgtcatcaagaactaaaaacttttgttcacgtttcagtattttgataaataatttaagcttagcctgaaatgccttttcattcatctttatttccttcttgtttcatttcctggaacatctgatcagcaatcttttctggtgagaccttatatgttccgtttgccaactgctgtttgattttgtcgaccttagccgcatccacatcatcgtctatatcacgatttttagcgttgtttactaatctttgagcagtatctgataatttaacattaaactgttgtggtgcaccctttttcgttgttttcgaggcttgattgtgatagtagttttggatcatttgtgaattgattgaagaaatatctcgattaattttcatgtgaatgcctcctttttcctttttgactctacaaatacagttatcggccaaaataaaaaaagttaaacctaaaagttcaactttttttaacttaatttattttattgatcctttgtttttgagaaatgatcttattgatccgcacgccaaagttttcattgatcacaacaacttccccagttgcgatcaattttccgttcaacatgatctccaaaggttcgtctgttaatttatcaagttcgataactgaaccagtgttaaagttcaaaatatctcgaacagtctttttagtccgccccaagacaacgcttaggtttaatggaatatctaagatcaaatctaagttatcaccgctgatttcttggtgactcgacaattcttcaaattcgggtttagaaatttccacgttactgacctgcgcctttctttgtggttgttcattgcttggtttttgcgggatcttaacttgttgcggagctggttgtggtttactaatagccttggctttctcgactgctggtttctccgcatcacgtttgacaactgttgctttgtcagacatcattgctttcacaatatctttgaccatttccaaagaaaagatctgcataatttcactctcgatcagtccttctacatccaagttaaatgaaatacaataaatttcttcctcacggtccaaagagtcttcattcacatcgccgggattttcccacaaatgcacttttggaggaagaatatcgactttttggttgatcatagtagccatggatgtcgaagctgaaccaatcatttgattcatcgcttcacccacggcacttaattcgacttcagtaaattcttctgaagctgactttccatcgccacccatcatcagatcagcaataaccgttgcatcactgacctctagcaacattaagttagttcctgctaaaccttcacgaaattcaacggtcgtagcaactttgggtgcatggatctggtcgagtaattcaccaaaatggatttttttaacacgtggtgtcgtaattgccacacgatgagtcagaattgatgacagagttgttgctgcctgtgacatggaaatattaccaacttcaccgatcaggtctttgaccccttggcgatctaacccctccaataattcttcatcatctgattgcgcagcttcttgagcatcactgccattcatcaaagcatctatttgttcttgtgttaaactctccgtcattcttcttccccctcgatcttgctcaataactcaattgcgaattgtccattctttttccctggtttgacccagtaaaacggtcggtcttcaatgtacgtatctaacggactggagattttagagtccagcttgatgacgtcacctggttctaatttcaagaaatcagccaagtccatttgggtgttgcccaaaacgacttccattggcagatctattgcgtttaacccgtgttttaattcgctttggtcatcttcacttaattcctggcttgagtcgaaccaattatgcaaactcaatttatctaggataccttcgaatgaaacataaggaatacacaagttaataaatgttgaaactccgaaaagctgtactgtgaaagtagctaatacaactggttcattaggcgataaggactgtagtaattgtggatttgtttctagagattcaagctcaacatcaagtgttaggacttctttccaaactgattgcaaaattttagagaattcacccataacctcatctaataatgttaattcgatatctgtaaaaccatttttatccaaaggcggttgatttttccgattactctccaaatcagcaccgccacacaacaattcgactaaagtcatacatagttggggattgatttcgatcatgtgtgatcctttaaggggagctgctttaaacattccaatcaaagtcacacgtgggatagaatgaatgaattcgtcataactgatctgctcgatcgatgctaattgcatatccaagttagtccgcaagatatttgaaagaacattgccgctcatcttagcgaagtcttcaaaaatcatgtgtaaggtatttatatattctttagatagccgtgtcggccttctaaaatcgtatggcttcgcttgtgattcgtcattttgctcttcatcgatcacttcttcgtctaattcgcccgaatcataggcatttaaaagtgaatcgatttcctgctgtgataacacctgatccacaaagacacttcctctcgctcattagttcattccacaattaaaaaatcttatcattaacgtcgatcacatcagcaatcgtttgttcacccaagtctaccacaccggtaaaataaagggcggcttgatcttcacttagttgaatatcatcaggatcaacatccacaacttcgatcacttcatcgatcaataatccacgacgttcatcatcttttttcattatcataatatttcggtttgtttttgattccggcagtcctactaactgtgccaagctgatcaccgtcaacactgtgcctcgcaaatttatcaagcccttgacccaaagcggagcaagcgggactttggtaatttgaaccgtatcaacaacttcttctacagtttcggcagctatcaaataatgttgctgattcattttaaacaaaatcatctgcattaaaacacactccctttcttaattaaattcagtcaatagaactttaattaagacaatgccttatctaaggctttgatcacccgatcagtatcaaaaggtttgacgataaaatcgactgctccagctctgatagcatccatgaccattccttgttggcccatcgcactgcacattacaacttttgcactgctatcaaattccttgatcattttcacggcctggatcccatccacatccggcatggtaatatccattgttaccaagtccggtttctcagactgataaaggtcgaaggcttcttgcccattttgcgcttctccagcgacctcatagccgttcttttctaaaatatcctttaatttcattctcataaaaacagcgtcatcgacgatcaaaactttatttgccacgcgacattctcctctcaaactccaagtgattttatcattttgtcaattacacccaactctgggatgaagtatagtgaagcttccaagtaattagaatcataagtaaattcatttctgatcaccatgatctcatcaccaaactgttcaaattccatatatgcactactaatcacggcaccaaacatatcaaacgaacttaccggaacttctggttttaatttcttttccagcatcccgccgatcgatgttaaaaatgaacttgaaacaatgttagtcaattcactaactgcagaaaccttaatttcttcggtcacaccttgatctgttcccatcatcaaacttgagatctctttagcggccgggtccgtaataacaaatagcatcgcaccctttaagtcaccatggatgctgcttaaaacggcataaacttcctggtcatcggccataacttgctggtaaagctcgtcataacttaagatattgacttctggaacacgcatcctgatcacactgccaaccatttgtgatattgttgtagctgctttgccgccgccaatattcataacttcttttaacgcatctaattgtatgtttgaatatgccatcttaacccacctgtgcgtctttacagatcgtattgacgtccaagatcaatgcgatcgagccgttgccaaggatcgtcgcgccttggaatcttttgattttttgcaacatcggatcaatcttcttgattacgatttcttgctgtccgatcaattcatcaactacgatcccaaagtctttattatcacccttgatcaagatcatatatttctttccctgatccttttcagggatattcaaaatgttggcagtccggatcactggtgtcaatcctgtctgtaaaggatagacttcctgactagcagtttgtaaaatattatcttcatggatcatttcgacccgttcaacaacatctaacgggatagcaaatgtttcttcgcctagtttgaccatcagtgcctgaataatagacaaggtcaacggtaatttgataactgttttcgtacccacattgactttactgtcaacttccaatgaaccgcccagttcgttgattttagcttgaacagcatccaagccgaccccacgtcctgaaatgttagtgatctttttagccgttgaaaagccaggattaaagactaacatttgcagctctttatcactcataccggtcgtatcgattccacgctcttcagcggtaattttaaggacttgtggatcaaggcctttaccatcatcgctcaaagtgatcatgaccttatttccttcttgataagccgataattttatctttccttcttccggtttgccaagtttctttctgttttcagcatcctcgatcccatggtcggctgaatttctaactaaatggatcaagggctcactgagttcggtaaccacagttttatctaattcagtttcttcgccctcaatttcaagagtcatctttttatttaactggttggaaagatcgcgaaccatccgtggaaaacgactaaagacaacgctgacttgctgcatccgaattttcaaaaccaaatcctgcagttcagatgtcaagcgtgaaacctgttctaaagattcatgcacttcttctaaattttggcgactattggcatcttctagttgattgcgataaacgaccaactcagatacaacattcaaaaaggtatccaaccgagaaagatcaactctgatcgactgatttttggcatttttttgatgcgaagtgctcttcttagacggggcttttgctttcttaggttcaggagcagcgctttttttctcagtagtattttctttgtcaacagctggttgtgcgtctttttgtggttcttcagcggctgccttttgagttttctcatcgaattctgccgtcaaaacttcagcgatctcactactagattcaatgatcttcttaatgtcatcttgattactttcagttaggatcaacaatttgaaatctgtatcaaaattgccttcttccagctggtcaggagccggttcagtgtgaataatatctccttcactgtcgagcttatcgatgactaagaatgctcgtgggcctttcagcattgactctggatcgattcgaactgccgcactgatcacattaagatgttgtgttttagcctgttcgatcgctgataagtcagcttcttctaaagtttcaaatttcagttcgagctgactatcttctggagctttcttctcatctacatttttatcagcggtttttgtttggccgccatctaattcattttcaactttatctaattcattccataattctgtgatctgatcttcgctttgttcttcttcatctcgcaagccgtctagaagttcggtcaatttatctaagcaccgaaaaatcagagaaatatgatcacttgttaccttcaacttgcctgatttgaaaagatcaaaaatatcttccattttatgagtcaacttgctcatgacagtatatcccatagttgctgacattccttttagggtatgtgcagctctaaaaatttcattgatcaaatcgatattgtctggttctttttcaagttctagaatattatcatttagttgtgttaaattatcttcgctttcttcgaaaaagatatcgcgataaacactattatcgtcagccatcaatgatccccccattcaaattatttacacctaagcacgaatggtctgtgcttattgttaaagtccgctaatgctcgacttttaaccggctcactccaccttgttttcttagtcaggttgcttgagacagaaagctccgcctatccaacattagttccacatcgcaaaatacgcaatctgaatctagtgtccgatagtgctcactttctcccgtctcactcaccttgtttctcatatataaacgactctattttctttaaccccagcttttctgcgctgttaagtgtttctgttgctcccgtgaacaatattccacctggtaccagcgcctcacttattttttgataaactcgatcgcgtgccatgggtttgaaataaatcgttacattgcgacaaattatcgcatgaaaacctgattcatactggtcagccaataaatcatgtttcttgaacgaaactcgttgtttgacggctggccctatttgatactggtctggtcctaatgacttaaaatatcgtctaacatcagtatcagaaacattttttaactcatttgtcgaatactgacctaaacgtgctttctttaaaatgtcatcatcaatatccgttgctagaacattgcccataagatgatttttttctaagatcatcgctaaggtgtatggttcggcgccggtcgaacaagccgcactccatagtttcaaattattaaattgtggagcaactttttctaacaaacatttttcaaaattactaaatatttcttgattgcggtaaaattcagtcacattaattgtcaaatgctcgataaactccgctcgtttgattggatctttgtccaaaaggtgttcatattcatgcaacgagttgaccccgtttttatccataatatttttgatcctgcgttgcatttgtctttctttataatcatcgagatggatatgatatttctgctccacccacctattaaaatcagtaaaattttcttccaacattttaatttcacccaacgatcgtctgtagtattttcccgatctcatgcaaacttacaacttcatcgacaacttgagcttcaattgcagatcttggcattccaaaaacggtacaagattcctgatcttcagctattacataaccgccttcatccatgattgtttgcaatcctgccgttccatcatgccccattccagtcaggataaaagctgttaaattagcaccataatgagcagccgccgtttcaaacaagtaatcaacggctggccttgtcccatgcatcttcggacgttgatctaacttgagccggtcaccttggatcgtcatgtgataattaccaggacacaagtagatctgatttttgaccagcatattatcactagcctcaacgactgtagcgccgctttcttcatttaaacgctcagaaaacgtgcgggtaaatcccgctggcatatgttgtacgataaaaacaggaatgtttgtatgactcacacctttaataatttctaatagtgcttttggtccacccgttgatgagccgatcacaacggcttggggcctgatgttacgctttttatgtgctccgttgggtttggctttatgattggcagcaactggcggtttactagaacgtccgcaaatatttttgatctttgcatacagttctctgacccactcgtcttgaatttccatcaggttcacaggtttttcgataaaatcggccgcaccatattctagagctttgatggttactgcctgatcactgactgcacttagcattatgaccgggatagaataatcctttttgatctgtctaagggcgctcaagccatccataacaggcatttcaatatccattaaaattaagtcaaaatcattatctgcatcaaggatgtccaaacaatttttaccgtttcgtgcaattcgaaccgttgaaacactgggcattttattcaatatatccgagatcactttgcgcataaatgcagagtcatcaaccatcaaaatcctattcataaggtataagaatcctttcacatctttacttttctctcttaaacaacattctcaagtcatcaatgagcaaattttcgttaattaaaaaacagtacatagtttttaaatgtatctattttcctgtctcacgaccctgatcaaggtcgaaaaatcgtttaaatcgacgaccatggtccttccgctgctgccgcccgtatcttggccaactaacgggatctgcaggcttgccaactgatttaaaacagcgtcaacatttctctgaccaatattagctgtcgtgaggttgtttttaaatccaaacatatttgcaccaccagagatcttagcttgaaatttagctcgtggtgctttttgcttaagttctttgaccatcaggggtaacgccgtattggcatacttagccaagttcaaacctgaagtcccgttcttttcaaacggtttactatcagggagcataatatgactcaatccaccgatttttgaaactggatcataaacgatcgttccaatacaagaacctagccccacggtcattattttattaggcgcgtatgaaattttataatcagagattcctaccctggtttcgttagtgttctgcagcatcatccgtattctcttctttttctgaattttcagtaatggaatctacggatgaaatgatctcctcttcttgtgaagagttgaaaagataatctaagttcaactcgatcactacttcatcgcccatcttcaaaaattgactgatatacgggcgcttcagtgatgatctgtccaaatctttttcataatccgtctcagtcagcgacatgatccctacgatctcctcgacaaagatccccatcgtccgttcgctccaatgtgccaagatcaccttatagtccagcgttgcaggcgataattcgccgtaaagccgcttactaagatcaacgattggcaacatctgttcttgatattcatacacacctaatacatagtctggcaattccggcaacgagataaacttttcagtttcgatcactcgtttaaccatttcaactggcaaagcaaaaacttgcttatgacttttaaaaacaacatattgtcccatttttgtacccctctttaacttctacaactaagaattgacgctgctagttttttaatttgaaactgccgatttgcaaacgtctgatctcatcagcttgttgaagctgttcgacacttttttcgagttcttcgatcaaggaataaaaatcatccaagttagccgatacttcctgtgtacttgcagaagtttcagcgatctgtgaatccatttgctgaatagaattattgactgcatcttttttatctttgatctcatctgcatgtgaactaacatcggttaggccatcgctcaactgcgtgacatcctcggtgatttgttcgctagccttcagtacaccagaaatattcatctgctgttgctgactgcccttgtatgatgcatccagatcaacagtcattttcttagacttagcacggatcgattcgatcagttctctaatattagtggttgatttgccggattgttctgccagatcacggacttcctcagcaacgattgcaaagcctttacctgcctcgcctgcacgagccgcctctattgaagcattcaaagccaacaaattagtctgttctgaaatatcattgatcaactgcacgatattgccaatactttgaatatcttgattcatcgccgtcatttcagaaacaatcttcttttgactttctgtttcttggttccaagaccgtgaaacttggcgcatcatttccatgttttgaatattactttgctttgattcgtcagcatagctattcattttttcaattttctggcgtatctcttcaatttggtcaccaaaaacattcatttgagcaactgtactttgagaagctgttgcttgctgtccagcattagtagcaatagtccccatcgcttgacggacaccatcgatcgaacttttagcgtgcgtcgattttccacttagatcgttgaccattgtttccgactgctcagtttcttccttgatcccagttaataaagctgaaaatgcattggctaaaccaagcaactggtcacgagttttaataaacattgggctttggccgggaactttgccgatctcgtcgatctgactgaaatctccctctaccatcttaccgacctgaacagaaagtttttttaatccgccggcttctcctcctgttactgccgtatttttatgaccaaatagtacatacaagagatgcaaagcgactacaatgaccgcgagtatccaaaaccttctcatctccgctgtctgtgccgaacttaaaacaaaagcccgaaaaacaattaaaacaatgactgtccctaaaactggcaagaaagctacttcggagttagcttttttagccgtcttcttacgtttttccatttgttttccttccccatataaaagatttggtatctgtcataatactcacttaagcaaaacgacactccaatctgttatatcggttaaaattttatttttttaaccgtttaccaaacatagacatcttttggatcagaaaatcttgaatatccaccgtctggatcatctcggatcagttctccattttttagttccaaagttcgatgacgcaaagaattaaccatggtactgtcatgtgttgctaaaatgatcgttgtccccatctgattcaggcgaaagaaaatttgcatgatctctttggccgacttaacgtctaaattagcagtaggttcgtccgcgataataactggcggatcattcaataacgcacgagcgatcgcaattttcttttgttgcccgactgaaagttcctgaggcaaccgctcaataaatagcatcatttcgacactggtcaatacctctgccatccgctcttcccacttttcagtggggatctctagcgctgacatacaggtttccatattttctttgatcgtcaatcgcggtaaaaaaaggtctttttgcgaaacgatccccaattgacggcgtagtttgtatatctgttcatttctcaaatattcaatttcaatattgccgatccgggctataccagaatcaatggagcgttgagcacttaagatctcaagtaaagttgttttcccagccccacttggaccaactacataaacaaattcaccttgttcgatcacgcatgaaatatttttatttgcccaaacattgccatatttttttgttacatttttaagttcgatcaattttttctcctaaatcagtcggtaaagtggttgatggtctccatcatttcatctgtagatgaagcagcgcgggcattcatttggtaagacctctgtgctgttaataattctgtcatttgagtagccagatctacattggaactttcaagagttccttgcatcacactactacctgccccagcggctctaaaaccgccattggctaaatacaagttatcaccaactgacaccaatgaatgtgcgttgtttggttcaaataaacgtaaagaccctaaaacctgatcaccggatctgatcgttccgtctgaagaaactttcaagtcccctgctggccaattttgttctggcacccgcgcgtcaactgcaacccgatagccgttgctggcgatcaaaccaccgttagcatcacgatgaaagtctcctgccttagtcaagtatgtattaccatcgggaccaatgatcccaaaaaaagcattgccgttaatagccatatcaagtgcacgaccggtcgtttcaaattttccgacttgatcatcgactcgtgctcccgcggcatttagaccagtattcgaatcaactcttgcattagaattaccaagtgcaccgtcgctattagttaaattattattcatcagctcattaaatgaattgatgattcccttatagcctactgtgttttcgttagcaatgttatgtgaaacattatccagattattttgcaagccgttcaaacctgttctgttaatggataaaatagaattcaagttcatttttacttactctcctcatttcctacatgatctgttttctcaagcctatactaagtaccatcaagactcactgtacgcctgagaaaaataaccaactatttgatctagatccgacctagttggttgactgccttatccaaggtcgaattagtagctgatagcactttttgttgagcctgaaattggcgcccggtttccattaatgagaccatctcatcagcagtagaaacattagaattttcaagcattccagcttggaccggcaaatcaatttgctgggctccctgcccggtataaagcgttccgccgacattttgaagttgtgcatttgctgggaaagacaccaccatcaaattttgttgtgcttgctgggcatcaactgggccgccatttcgacctatcacttgaaaaccttcttcagtgatcagctgaccggcatcattcactgaaaaatgaccatcacgcgtatacgcgatttgaccatttcccattctaacggcaaaaaagccattgccttgaactgcaaaatccgttgccaagcctgtcggttcaagcgagcctttttgcatgtccagagcactgccctgaatttgattgccccatgtaaaaccgccaatctcatggcgggtttcatttttgggaccagcctggttattatgtaactgtgcctcgttcattgttgcttcaaacaaatttttttgcaggtagccaggtgtcttgatattagcgatgttaccgctaatattttcttgttgagcttgcaaaacattaaaactatgtcttaaagtatcaattcctctaatcatcattttcctccataaatccttttagttttccaactgcacgcccatggatctgtgaaacgcgtgcaatagaaacgtctaagaccaaactaatttctttaagtgtcatttcctgttcgtaatacaaactcaaaactaattgttctctttcagaaagcttgctgatcgccgctgccaactcctgtttcatttctgtttccaacaaatgttcttgtgcatcgcccgtttttttatcacgaaagatctcttgtctgctaggcgattgttctgctgaaaacaagacatcctccaaagagatactagccatataatgcaagctatcataaatatcgttcagctttttctgattgatttggagcttactgcataattctttgtcagtagcttctcgtttcaattcttgctctaattcctgcttagcccgataatagcgagtcaaattgtcaaatttataacgagacaaccgaccgtgactgcggatctcatcaatgatggtcccacggatccgtacataagcataactttcaaatggtactttcttttgtggatcaaatttcttaagtgcatcgatcaagccgatcactccagtattgaagagatcttcgtagtcataatcggagcttttaacagtgatccgagcgatgaccttttcaactaaaggcaaatatttgataacttgatcttccatattcatctcatacaagaaaaaagctcctttctgaaaataccgggtgaagtaattgtcttctatccttgttcctgcaaatatgtgttgcaaattggaatgtgacgcttactttggcatagtttgtctcacaaatcagaatgtaacgcgtactctggcatagtttgtgtcacaaatcataatgcaacgcatactctggcatagtttgtgtcacaaatcataatgcaacgcatactttggcgtagtttgtgtcgcaaatcgaaatgtgacgctttctctggcatagtttgtgccacaagtcagaatgtgatgcatactctggctatgtttttctcacaagtcagaatgtgatgcatactctggccagctatcttcaacacgccttcccacagagtgccttcctaaaattgcaactgcccgactgcctcgatcccgatttcatttgggatctcatttaacgacaaaattgccaaatctgggaagttaaacgacaacaactttctaaacgcagttctagtctgtggatttgtcaaaaggacaaaggaaatattttccaccagcattttttgattcagctgagtgatcgcatccaacatcttattgaccgtatccggctgcaaaacaggatacgaaccagttgctgtttttttaatactctgtgcaaccatttcttcaattttgggatgcacagtaacggcataaattttgttatcttcaccgacatacttgttggcaattgttcttcttaatgcttggcgaacgtattctgtcagcgtttcggtatctttggtgacggtcccataatctgccagagtttctaagatagttgataaatcattgatcggtaccttttcttccaacaaattctggaggaccttttcaacttctcctaagcgtaaaatatctgggatcaattcatcgatcacaacgttgctttgttgcttaatgccttccaataattgcttaacttcttggcgtcccaaaagttcaggagcatgtgagtaaataacttccttcaaatgagtggcgataacagtcaaaggttcgataactgtgaatccttgcaggtcagccgcttctttatcactttcattgatccacatcgcttctaaatgaaaggctggttccacggcttggatgccattaaacgggatctcatccccagtcggactaaagatcatgtatttatcaggataaatatcacccgtgccgacctcattgcccttgatcttgatagaataattatttgcatccaggtacaagttatctcggatcctcactggactgaccaagatccctaattcatgagcagtttgtttacgtaaagcaatgatccggctcatcaaactattgtcgatcgaactatcgaccagcggtatcagtgcataaccaatttcgatcgctaaagtttcgacttggaaatcggctacatcttcgtcttcttggacatcttttttcttttgtaaagccaaagtctgttttcgttgttgctcttccttaactttcttagcatcctgttgtttgatcaggaagctaacaccaagtagggctaaccccataaccataaagggaataaacggaaaaccggggacaagggataaaaccattaagatccccgctacgatccggaatatttgcggattgcgcaacgcatcttcagcaatatctttaccaaacgtactatcattatcagagcgagtaacaataatacctgaggcaattgagatcaatagtgaagggatcgaactgaccaagccatcaccgatcgacagcttgccaaactgtgataaagcttccattgcgctgagatcacctttcatagtaaagatgatcgttccaccaatcagattgactaaaacaatgacgatccccgcaatggcatcacctttaacgaacttgctggcaccatccatcgaaccataaaaatctgcttcacgttgcaggtcttcccgtcgttttctagcctgcttttcatcgatcaaacccgagttcagatccgaatcgatcgccatctgtttccctggcatagcatccaaggtgaaacgggccgacacttctgaaacacggccggaaccgttagtcacaacgaccaactgcacgatcatgatgatcacgaacaagatgatcccaacaatatagtttttccctgccataacgtcagcaaaggcggcaataacatgtcccccatcaccttgtgttaggatcgcacgagtcgatgacatgtttaaacctaacttgaacatcgttgtgatcaaaagtaaggttggaaaagtagtaaattccaagactgagtgagtaaacatggtgatcaataatatgttcatggcgatcgccatgttgatggttatcaaaaaatccaagactggcagcggaagcggaataatgatcaaaccaatgatactgaccaccaaaagtgaaacgatcaggtcagctggtctgagtgcattcttcttagctgctttttgcttgtttttcatcagttactctctctcctatcaactcaaatccggttcaactttaaccagacttatattttatacttagcttcttcatccaaccggtagaccaaagcgatcaaatcagcgactggctcaaaaaactcttccggaatgaattctcctgcctcgatcttgagataaattgctcgtgccagcggtttattctcaatgatcggtacatcattttttctggcttcttctttcattttcatggcgacctcatcagctcctttagcaagcagctgtgggactggtgtttctgtcttatcatacttgattgccaacgctaaatgagtcgggttcgccaaaacgactgtcgcatctttaacttgggcgatcgagttccggaccatcgcctgatacttagctttccgctgcgctttgaccttcggatcgccttccatttgtttcatttcttctttgatctcttgtttagtcatcttcaatttcttagtccgactgaaactttgataggcaaaatctgccaaccccaaaaccaacaaaaccaaggcaatctgcatccctagttctttacaaaaattgagaataaaaaacaagatcttggcaggaccaacagaaccagcatttaaaatgtcacgtaacgtagatatgtatttgcgataacacagatatgcgatcagtaagaactttgccagcgtttttcccaggttgactatcgcatccagactaaacatccttttgaaaccacttaaagggttcaaacgtttgaaatcaggctttaatggtttagccgtaaataaaaaaccaatttgcacaaaattccccaaaaaactgatcaaataaccgacgaccaagaatggtgctgccacgatcaaaaccgttaagatcgcctgcaagccaaccttaggtaggtctgcgtataagacctggtagttatccaactgctcgataaagcctgtcatataaggaaaaaacttgcctaatccaaattgccaagcaggaataaagataaacgaaaaggtcaataaagccaaagcagctgttaagtctggacttctagcaacatttcccttcttgcgcgcatctcttttacgcttaggggtcggtttttcagttttaccatctttatccatgaaataacctttcctttatcagactatgcctgacctaccgaacgcaggaactcgactagatactcatatgactgtgggattatctttcccaacaattccacgacatttggcagcatgatcaaaaagatgatcattcctacagtagatttaagagacaaacttaacatcagcacgttcatttgcggcacagaccgtgacaagatccccaatacaatatcgatcaccatcacagcaatgatcaaaggtgcagcaacattaaaagccatggcaagggtcttactagtcaaaatgaccacacccttaacacttgcattcgtcaaagtggcggttcctaaaggaacaatcgtaaaagatagcatcacagcgcgaaacaattccagatgcaaatttaacatgaagaaaactgccagtgccaaccagtagtacatccgaccaaattgtgaactggaaacttccattgtcctgtcataagcctggcccatcgaaaaaccattttgaaaatcgatcagggaacccgccatgatcacagcttgaaaaaccagttgactaacatagcccatggcaagccccaataaagtctcctttaaagccgccaaagcgaagataaccacactcatcgccttgaccttgccaactaaaggaatggcagcaactaccaaactccccccaacgatcagcttagcagtattaggaaaacttctttgtgataaaatcggcgctgtgaccataaaagaaaatatccggcaaatcaccaaactaactaattgtacttcggccactgacgtcacacccccgagatcaagcggaagatatattccgtgaattcttttagcgttgtgatcataaagtttccagccaagatcagggtcacaaaaattgcgaccaacttagggacaaaactcaaagtttgttcttgaatctgggtcgtagcttgaaagatactaatgaccaaaccaacgaccatcgcaactatcacgattggacctgaaactactaagattctgatcaccgcttcacgcatgaccatcaagactaatgaaacagacattaagctccccctctaactgaaactatgaactaacgattcgactaacaagtaccagccatctaccatcacgaataataataatttaaacggcaatgagatcataaccggcgacagcatgatcatccccatcgccatcagcacactcgagacgaccatatctatgatcaaaaacgggataaatatcaaaaagccaatactaaaggctgtccgcagctcactaataataaaagccggagtaagtgtcgttagcggaactgactccacatttttatagcgatgcttgtctttagaaacatctaagaacaatttgacatctttttttcgagtttcttttcccataaattccttaagcctgacctctgaacggttgaatgcttgtttttcagtgatctcctgccgactataaggttggatcgcttctttatagatatctgtataaacaggcttcatcgtaaacagggtcaaaaacaaagccaagccaagcaaaacttgatttggtgggttttgctgcgttcctaaggcacttctagtaaatgaaaggaccatgatgatccgtgtaaaagatgtcatcatgactaacaacagcgggaccacggataaaatcgtcatcatcacaaacacattaacgatctgcgacgaatttccgctctgtccactattgatcaaatcagtaatgccacgagaaacatcatcgaggccagctgcatgcactgaaactggtcggaacaagcaagccgttaaggacaacccgctcagtattttactttgctttttcgtagtcattacttctttctcttattctgcagcttgatcgtcttttgcttgagaatggccgcaaaatctattttttcactcgcttgatcatctgaactggtaaataattgctcaacctcttcttttgataactcagagatcaccgtactgccttgttctgccaagctcatcaagtaatagcgctcgatgacttgcacgatcccaagtgcggaagtttttgaaactgggattttcttgataactcgaaattgccgatcctgtggagcaacgaatttctgtaagtattttaaaaataagttgatcaaaacgatcacgataattaatccaaccaccattttgatcaacgacaacgttaactccatttgaatactcctcgtatgatttaacttattggatcacaaaatctgtcacataaacttcttgcactattgaactgccataatttttattaatagcctctttgacttgttctttgacctcatcgatactttgattatttttcaataaatctgcggccctttttggtttcaaaacacggatcatgctgtcacgcactaaaggcatgtctttttttaatgcttttgcttgatcatcgtcagccactaacaaagagacctttaagcgtaaatattgtggatcagctgcatcatccgttgccaaattaacaataaacattttgacgtttaccagacgctgtcttttagaaatggcagctcctgtttgcactttttcagctttaggttttgcgtcttgactattaaagtacttgccgaaaatgatcgtgccggcagcactagccccaaatgctaaaacgactactaaaacaataagcaatccccatttgatgccacctgctttagtttcagttgtttctacttcttcattcttcttcattgtttccctcgttattcccttcaaaaagattctcaccagaaaaaattcggtgacgatattctatgatcgcttccctaatttcaaacgctgtgtctctaactaccagcgttttcccatcgacaagcgtgattactgtatctggggtttcatcaattcgatagatcaaatctgggttcaaataaaattcttttcctttaaatgaagttaacaaaatcatgaacctgccccctattatttatcctgtacataaaataaaaattttaccttacaggttctttttccccttttgatcaaattgctgcgctcactattctaggacagctcctcaagccaggactttccgtctaaccaacttccacacacaatgctaaaaaacgcattatggcctagaagtccgttagtactcgagtcctacccggcttacctcgctcactatcttaggacagctcctcaacgcaggagtctgcgcctatctagtttaaacatcacggtgccaaaaacgcaccatgatgtctaaacccgatattgctcgtctcctaaccgcgttgtttcgctcactatctctttaggttgatcaattcttgcaacatctcgtctgacgttgtgatactccttgcattggcctgatatgctctgcttgtaacgatcatgtcagagaattcttgcgctaagtcaacgttagaatcttccaatgtccccgctaataaagtgttggtcccatctgtaccaggtactaaattattggcattaccagaatcctgtgatatttcataagtgctgttaccgatcttgcttaagccggctggattactgaacgtagcaatcgacactgtaccgatcacttcatcttccgcgccataacgcgcagtaactttgccatcaggaccgattgaaacgtgaccttcaactaacttttcaccagctgcattttgagctggtactgtaattggagttaacgctccgccttcctgtccgggagcatagcccatcacacgtaaaccatcagcattagtcaagttgccattagcatcgatcttcaaagcaccgttacgtgaataaacctgaccattattaccatctcgctcaaatactaaaaacccgctaccattgatatataagtccaaagcacggccagtcgtgttttgaataccttgacccatgtctgtatcgatcgcaccgacctgaaccccaagtccaacttgcttaccatcaataccgccaacggttgcacgtggtcctgaagcattcgcagttgtctgacttaaaatatctgaaaagttagcacggcttgacttgaagccgatcgtgttcgcattagcaatgttgttggaaataacatccaacctggtttgttgactcttcattcctgaaacacctgaatacaatgaacgtaacatttaaaattcctcctatttgtgtagcatctttttaaattttgctattttttaatcttttggttctctaacttctttgatggcacccatttcatattccgtaccgttgacggtcagcttggcaataccgccagtaaagttgactttatcaactcttccttgcttttcattgccttgttcatcaacaactgtgacatccttgcccattaaattgaaagcttgttgttgctgccctaaaagcaaagaattattcatcattgtcgacatattatttaattcctgtaaggtagcaaattgtgccatttgtgaaatataatctgtaccactgctattggaatctccatctccggtcatggaagggttagacattgatgtcgctaagatcttcaaaaaatcatccattgaaagtcccaaagcatttttagcagcaccgttttgtgaagtactttttgttatctcactcgaactgccaagactgtttgcttgtacaccgcttaaattgtccatgaaatatattcctcctttgatcacgcatactctgagacgctcaaaccaacaaactgatcgttccgtgcttgatttgttcttcgcctggcaaatgttcttcactgaccacttgtgtcctcgtcttgtgcgaacgtgcaaatcggcgttgctgttcttgctcattttgcatgaaatcaccagctggaccatctcgctgctcgcctaaaagttcagaagtttccgccgtttgtctcacagtttcaacttgtttcaatgttttagtcgttggatcaagctgcagctgctccatgatctgctctaatttatgtgtgattttttgtaacatatcacgtgcagtactattttgaacttcaaattctaggctgactgcctgttcattcgtctttaccgcaactttcatctcacccagattagccggtttcaaattaaaaactatgctctgggtattgcccttactggataacaagcttttctcaactactggagtaagtgctttttgcaaatttctcacgacctgctcgaccggtctagttatcgttgttactttttgccccacattagcttgcgtaactgtcgcgcttttttgttcaactacgcttaccatacacgttctatctgtaagctcactaaaatctatgatttcagctgcttgtttttgtcctgctagcgaagctttcgtaccgatcaagatttttgaactaactgataaaatttccgctgactgttttagcgacgatactgaaagctcgtctgccatcgctgcaacttcaggtgatgttttaatttcttgtttacccagctgccctgctttagaaactaacgggctctcaatgatctttgtaggttgaaccgactcaacttccagatcagtctgctgagcagcttcctgcttgatctttgtgtccgaactcacaaccagatttattgtcgagttagattcttgaatagcctggctttcaccagctgacttagaagttaccatactaacaaagtttgctatctgttccttcaaggtcgcttgctgggttgcagacatttcatccaagtcaattacgctttgtgccggattttcgccaaattgctcggtttgttgtggtgcaacgtcattgtctgcaataatttcggctatcggtcctgccttggcttgctttaagtctagtggaggagcagcatccttaggtaatttttcattttttccggcgttatcattttcttggagcggttcgactgcttctgattggtcatgctcgatctctagtaaaatattttgctttttcaaatgatcgctactgctaactaattccttgagtccttccagcaaatcaggcgatatttggacttttccttgcttgaccaagtcatccaaagaaactgtaccgtttactaactgttggaacgttttcgagtcaatttgcaagacttgctctagctctttttttgtttgcgaatcagtagttttaatatgtttgttaagcatgtctttagaagtctctagtcgatttttagcctttttttgtctgaaacctttatcatcattaaccgcaatttccggcttatcttgtgctaaaaaagcctgaaatttccccgtttgttttttggttggcttggctttagcaacctgcaaaccagcaattttcttacctgtaactaccttttgcatttcattgtcctcctttcaaacccttgctttaacgtcaaggtcaagcgatatttacattttgttgtggccggtgaaaatcatccaactgcttttgttcctcatgggctagctccttttgatattgtgcaagctgctttgttttaagccgctctaatattttccgttgtttctgtgcttcgatcaattcactgcgaatttgctctttttgtgcttgcaaccccaacagttgatcgtgacaaatcatgatctggtcgttaagagcttgaatatagcgtcgtgtgacttgcattctgctaactgaaaattgtggagtttccatcatgctgtctttttcttgcatgacttgatccaattcagtatttttctcgttttccaggcggttgacttcagcaaaatgccccttgacctggtcttcaacttgcaaacgatattccagcactttttgtaatgaaaaattaaattcttccatccctgatctccctacccttctgcagtgatccgaccgtcacctaaaacattattcgaagcaaacaactgctgcaatctctcctctgtatctgtgaaacttgaaaattcatccacggcttgttgcaaaaagtcatcgatcggtttgtgcagctgcacagcatagtcgatcacaggatttgttccgctcttatatgccccgatatctatcaaatctttcgcatcagcgtatgttttcaaattttcacgcaattcactggcatggatattatgttcttgagagaccaacgatttcatcaaacgactgacactaggttgaacatcaactgccggataatgattttgggccgcaatttctcgcgataaaataatgtgcccgtctaagatcccgcgaactgcatcagcaatcggttcgttcatgtcgtcaccttcgaccaagaccgtataaaatgctgtgatcgaacccttgtcagacattccgcttctttccatcaacttgggtaattcggcaaaaaccgaaggagtataaccccgggtagttggcggttccccagttgatagaccaatttcacgttgagccatcgcaaaacgtgtgaccgaatccatcatcaaaacaacttttttgccctgatcacgaaaatactcagcaattgccgtggccgtatatgcacctttcagccgaactaagggcggcatatcagaagtagcacacactacgatcgacttagcataaccttcacccaagtctttttcgataaattctctcacctcacggccacgttcaccgatcaaaccgatcacgatcacatcggcctgacaatacttagcgatcatccccagcaaagtacttttaccgaccccactgccggcaaagatcccgactcgctgtccctcgccaaccgttaataatccatcgattgctcgaataccagtcggcatgattttttcaatgtcttgccgtttaaatggatctggggcttcctgcatcgctggatacccgaccatttcagactggtcaagcttggaacctttcaatggacgtcctaggccatcgaaagtatgtcccagcatttttggcccaaccttgacttcaagtgtcttgccagttgcagccactaggcaacccggcgcgatcccctctagctcatctaatggcatcaataagaccgtttgtttaacgaatccaacaacctccgtcactgtcttttttcccgcttttttcgcatagacctcacagacttcaccgacgaaggcttgcaaaccttcgactttgatcacaagaccaacaacttcgctgactttgccgtataccgaataaaaaggatattttttcgcttggtttaaataatttttaaaggggatctttatctttgtcatttatttacctcataattgttccagaaaaccttgtaattcctttttaatgtcaatatcaactaccgattcgtttgattcgacacgcagctgcaaagcatttaaactatcatcatcaaaaattatgtaacgcagatcaggaatttcttctttgacctgctctaacttagtggtcagtgattcatgataagcggagttagcccagaccatcaatacttcatttggtttttcgagttcgaataataatggactcaaaattgcagtgatcttttctggcgttagttccaactgcgtcttcaaaataatttcggccaactgtactgcaaaagaagtgatctcatcctgtttttctgccaggtactgttttgactctgccagactttgctccacgttatcttgtgcctgcttgactagaggtgccattttttgttgtccttttgtcacagcctcctggtatccatctttttttccctgagcataaccagaatcataggcttcttgcttgatttctgctgccttttgttttgcatctactaacatctcagctttcagctgttttagcttttgctggtaagctgccgtctgatgtgctaatttagcgtcaagagctgttaactgtggatcttgcttttttatttgaggaacaaaatctgctgtctttataccaactttcttaccatgcaggggcattgcctgctgtttcaaaatattattagacaatgctgtcttgacctcctcgaccaatatagatctcgcctctttcgtctaacttccgaataactgcgacaactttttgttgtgcttcttcgacagctgataatctagttggacccataaattcaagatcttctttgatattttcaaccgcatgttgtgacatattaccgaagataaagtctttgatacgatcatcgctgcctttcaaggccagctctaatacatcgtttgtcacatcacgtaatactttttgcacatccaacgcttgcaaagtagtaatatcttcgaaagtaaataggttggcctgaacttcactggccaattctggctgtctgctttccagaccggccaagatcgtcttttcagtactgcggcccgttgaattcaagatatcgaccaatgcgccgacaccaccgatactctcacgttcaccatcaaccacattggaaaacttatcttccataactttttcgatccgctgaatcgtttctggtgaagtggccgaaatcgttgccactcgttcagctacatcagattgcaattcatctggaaattctgacaaaacactggcagccttctcagcctgcatataacacaatatcaaagcaatagtttgtggatgttcttctactagcaaattaactaattgctgctcattagcacgacgggcaatgttaaacggttgttcccgcaactggatcgtgttcaaaacatccagaacttctttggctcgttgcggccctaacgaattaactaaaagatcctttgcgtagtcgatcccaccatccaaaacatattgtctggctgtggcagtgtcgacaaattcatcgatgacagcattcttttcttctggagtcacataatctgtattagctatttcataactgactttttgaatcatactgtcaggtaaaagtttcattacctgggaggacgcttctgaccctaaagagatcattaagatcgccgctttttttactccactcaattgagccatctcttatttcccctcctagtgatgatctttcatccaagctttcagcaattcagctgtaactgctggattagtctgggcataatctttagcctgtttatccttagcttgtctttctttgacttctggtttttcctgcagaggtactgctttttcctcttgttttgcttccggtaacggctcactattcgctgaagaagtaggtccaggttgtggtgaatcatcagttacatcgacatcataatcatcatcgtagtagtcatcatcgtcatcttggcgtttcttgcgaatgatcaaaaaggctgcgataccagcgattgcgatgacaccgatcggaagggcgatgtaccaccacggcacattattcttcaccgtcttagtcttatgaacttttggtgtcgtgtctggaacatctaaagcttgaacagtaactttatcaccacgatccttatcgtaaccgatggctgaacgcacaatacttttgatctgcgcctgctggtccccactaacatctccacgaatagcaacagaggtcgttaatctcttcacagttcccggtgcgctaacttgcttagtcacatcagtatctaattcattattgatcgtccggctatatgaagcgccattatcggtattatcgccagttacgttagagacattatcatcggtttgaccagtctgtgcttgttggatctgttcttggttcccattagcttgaacattttcactccgtaaatttggattgctatatttcgtagtcttgcgttccagtgcgtcaaaattaaggtcagcgttaactgcgacgctgattttgtttccatcagctaatgggcccaaaacacgtgtgatcttcttttcaagttgtttttcaaactgtttttggatctgcatatatttactgttcgcacctgtcagatcatcattgtcattattcccatcagccaatacatttccattactatcaacaactttaacgttttcggctgttaatcccttaacggcacctgtggtcaactcaacgatccctttaactgctgaatttgagatcgtgttgccattcaacgtcaatgcaaccgatgctttggctttttttcctttggcatcatcactaaagacatcatcatcaggcatcgttaacattactttagcttttttgacagcatttaaagaaccgatcgaacgttccagctcaccagtcgttgcccgctgatacatgatcttacggtcttcatcagtggtcatcatgctggtatcatcaaataactcatagccttgtgaactatcgggcagtttgttatcgacggccatatcgatccgatactggtcgacttttgtcttatcagctaagatcgttttaccatcatcttttaacttgtacttgatgtcttgatcttccaaatctttcgtaaccgtcccagcgtctgcgtcacttaaattcgaaaacaaaacggcatactcaactctggtgttcagataatatacgatcccaccagcagcaagtatgctgatcaaaccagctatgatagcaatttttactaaacgatttagattagaccatttgtcttttaagtttccaaaaaagtcctttactttatccacttccaagcccccactacacgactaaaactgcatgttcttaagatcgttataagcttccaaagctttattacgaacttgaactgcagtctgtaaagttaattgactttcagtcatattgatcatgacctgccctaagtcatcttgttttccactgatcatatcggtagtcgactgatccataactttcatgcttgaatttaaaccggataaagcatgatccaaataatcaccgaatgttttaccggcgcctttaactgtctgatcagaattatcgagtccagtaactttgcgcagttgagtagcataattatttaagccgttaataccattgacctgtgccattttatctctcctaattttctgatatttctagtgccttactcaagatctgcttattgacctgactcgaagcaacatttgcttcgtaagatctttgcgattggatcaagtcgatcatctcatccgccaagttaacattcggtaaatgaacataaccattttggtcggcatcggggtcatctggtttataactcaacttctcagtttgatcctgtgcaatgccagtcactcttacaccggaactctgtcgtttgttggcttccatgatatttccattgtctgcttcgacttgacgtaaattttcagcgaattgaactgacttccggcggtacgggccaccttccggcgttcgtgttgtattgacgtttgcaatattagttgatgtcgtatcaagctttaaccgctctaaggctaagccgctggcattgatctgcaatccattaaaaatactcactctgatctcctcttctccaatttagtcttaccattaatgattcaaaacataactcatcatttggtaacgccctttgagttgtgatgtcaacgcgctataattcaaaccattttgtgcctgatttaacatctcaacatctaaatcaacgttattgccattttctttaacagccgtatcattgcgcacgctttcatgcggttcaattgccccgcctgcttgcatatgcattttagatgtagtttttaggtgtgtttcttggtccaaagcattattcaaaacactttcaaactcgattcgtttagctttgaaacccggcgtattgacattagcaatattatttgcgttcaattgtgctctattagaagaaacgtttaaagcttctttcattaagccatatgtattttccaaaattaattacacctattttctttgatttaacactaatattttcaaactttttatatttcaattttcatagtagttgcttgcagccaagatgtcccctttatcaaactttttctatatttttcacagcattataattttagctattaacatactcacaatcaagttaatttttaagttattttcaattattttattaattatttttttaactcgtcgtttgtaaaattaagttagaaataaaaaagccatttgtggtgaagtgcaacagaaaagttagacaaaattaaaattttaagcaactaatgtatgttctcggtattctgccggggacatattttttgttttcaaagaaatgcgtcgatgattaaaccattcgacgtattctttagaaagttgtgtgagctcagaaatatccttgcaaggtgggaatccatttaaacattctgttttataaagatgaaaaaaactttcgattggggcattgtcgtgacaatttcctttacgtgacatactttgaatgaaattattatttttaagtttttcagtgtagtaatttaattgataatgccatccttgatcagaatgaattattggttgcacagattcaggtagcttgataatcaactcgttcagagttgatattatcaagctactattaggactatcatttattttaaatgctaaaacctctttactagcctcatccgtaatagcagaaatatacgcccaactattatctttcaatcggacttgtgttacgtccgtatgtagtactttgtagggcaatgtctcattaaaagtttgtttcaagatgttgtctgagattcttccaacattgcctttatatgaagagtatttgccattcttatgacgattatacatagatacttgaacgtttaattcatccattagacgacgaataacagtgtcagacaaatggatatttaactttaaaagttctttttgtactcggcgataaccgtaggttagccggcctcgaaattttccatcttcagtaatcttaatgatttcttttttcacatccgcatacttgtcttgataatttttaagccttttacgctcgtcatgataagtagccttcttaatgcctatggcattaagaatatcacctattttatatctatcggatttagataattcgtcttggtcagccctgatctgatctactatttgtgtttttcgtttccctttgagggtccgaacagggtcactgatttttttaggatatcacgttccaatttagtgtcataaagttccttgtttttttctgcgagttcctctcgtagacgttctacttcacttttgtttactaattgacgtaattgctttttatttcgtttcattttggtcggtctacctttcggacgaggcttcaaacctaatataccttctcgattaaaagtagtgcgccaaatactaatttgacatggtataagatcgaatttagcggctacctcactttgtgactcgtcatgagtttgatagtagtctatcacatctaatttaaactcggcagaaaattctcgtttaacatttctacgtttaagcgaatctacaccgcttaaacgatatctttgaatccaatgagcaacttgtcttctaggcaaatagtatttttcggcaattcctttggcactaatatttccttgaagatactcaccaactatcttagcttttaaactagaactgtatttgaccatataaaaagagctccataactgttagatttcttgtctaactattatgaagcacttcatggtagacttttgaatatccctaatcaaaagagaggtaaccacaaatgacttataaacatcttaccacatgtgaattaacctttatatataacttttggaaataagatattaaagcctatcatgccgctaaagctcttaaacgttccagcgaaaccgtttatcgtgtttaccggtttctagatgctggtaattcaattagtcaatttcaagaaaatcatcgagttaataaaactcattgcggtcgaaaagcaattgaattaccagaagatgaaaccaaatacattaagcagaaactcgcattaggttggacccctgatacgattattgttcgagctgagatacagatcagttgtagtatgagaaccttataccgactttttcaaagaggtgttttcaatgtgaaattgttgccaatgaaaggtaaaaggcatccaaatggttacgttgaacggcgtggtaaagctggccgactcggcagaagtatttatcaacgctatcaggattatcctcattttcaacatgaatttggtcatttagaagcagacaccgtccaaagcaaagcacatcaaggtgcagttatgaccttagttgagcgtctctccaaagttgaaatcattttaaacatccaacaaaaatcggctgaatgcgttaataaacatcttaatcaatggttgtcccaacagccaaaacaccttttcaagtcaattacttttgataatggtaaagaattcactggttggaaagaaatcgcaaataagcatgatattagtacttattttgccgaagttggggctcctaaccagcgtggcttaaacgaaaataataatggactaattagacgagatggtctcaacaagagcatggattttcgcaatttaccaaatgctttagttcaacaagtcagtagccggcgtaatcgtattccaagaaaatcattaaattataaaacaccaattgaggtattcatggaaaacatcacagataaacagctatgttatttctaacttaatttgacatttcaagagactaaaaaaggcgaactatcgcatttatgtatgccatttctgaaccacaaaaattttgaaagcgccttgattgctaatttatatataaatttaaagaatgtctaataaatttgcttgttaatatacaaatttaaaaattagtcatttttttggcattttttacttatattatatttcaaaaattattcttgttgaaataatttttgcgaagaaaatgagattttcttactgaataaccgaattacccacccaattttcatttttcgctattccatattgaaaatgtacttcaactattttcaataataatttgctcagtttatttttttatcactagttccactctcctatttttagcacgccccgctgatgtatcgttagttgctttggggttattttcaccaaaagcttcaattgagacgttgccttccgtcactgccttttgctgcacgaagaaccgcatgactgaaactgctcgagcagcactcaattcccagttacttggatagtctttcgattcttgtggcacattatctgtataaccagcaataatgacctcattttcttttagttgttgaatttttggccccagttcctttaaagctgcagcagaatcggcagtcagatccgcactaccgctgtcaaataaaatattgctatccaaatttaaatgtagtccgtcagacttgagtgaagcttttgtgttttttcccaagttcatctctgcagcagtttcgtttaaactatgagcaatttcttttaattgctgttcttgattctgttgtgaaatactgccctttactccattttcttgtttgatcgctgcttttttagttttagggtccggtgcctgactatctttttctttattagttactgatggtgaatcaagttcgattgcgtttgatccaccgactgccgcacttttatgattttgttgctctggtgacaaagccatgatcgacccaaactctgaactgattttttggaacttactatcatcgaccttggctgaagcaaacatcacaataaacagggcaagtagcaatgttaacatgtcagaataagggagcatccaggcttcactatcactatcattttttttctttttcttacgcatgcctgtcccactttctttccaatctactcatttttttcaatgtcagttcgtctggtttcactgatcatactttcaaggttcttttccattgttttcgctgaaactccttcttcgatcgccaatgttcctgccatgatcagttctaaattttgaatttcttgttctgatttacgttgcagtcttttagcaaaaggcatgaacactaagtatcccataaaaataccaaataacgtcgcaacaaaggccgatgagatcgactctcccaatacactaacgttatctaagtgtccaagtgcaccgatcaagccgatcacggcacccatcacaccaagtgtgggtgaagtactgccggcagtttgcatcatggcagttcctttagcatgccgttcctcgatcgatgagatctcattttccatgatttcttcgatttcttctttatcgatcccgtcgaccaccatctccatgccgcgttttaaaaacgcatctttttctggatctaagttgttaacaggcgtttccaaggccaacaagccttcacgcctggcaacatttgataattctactaatttatcgatcgttgcgcggtaatcatacttttttgcttgaaataatactttgaaaattcctggtaaacgtttgatgtcagccagcggatatgtattgatcagcgctacaatgattcccccaaaaataatcatcatggcctcggggctaaataacatggctaagctagcaccttttaaaatcatcgctgccaccacgatgaccaacgcggcacagataccgatcagtaaaaacaggtccattttttctcctcctcttcactcttccattttatttatcggacaaaattgaaaagatttaaggaaactcattaaaaaaatttccaaaaaaataaaacgactacagaattaacaagcctgtagtcgtttcaactaaatattttgtttttggctaacttcattccaagtttccaataattcttctaacaatttaacaatgggcggcagcttttccttgtctttgctgacattagcggccactaattgttgcgtgataaagttatataaacgatttaagtctgtcgtaatttgactatcaaccgaatgatctaatgaaaatttcagctcatcaacaatgtcttgagctctaagcaattcatgatttgcctttaccatatcattttgattcaatgcaatttcagctaacttgattgctttgatgcccccagagatcaataaactgatcagcttgttaggcgaagcggtcaacacttgattcttcaaataaaaattacgttgcttttgtgcctgttttacatccatttattcaattcccccgccatcaatttaactattttgtaattccagcttgaagtcacggatcaatattctaattcgatcatcgtcccatcggtaattttttggtggtaagtcccacccctggaagacttttgacgatctaaactctttaattgctgcaacacttttttcttctctttcgccgttacttgcatcagactctgatattcagacattacttgttgtaaaaccactttttgctgcgctgacaagtttgactcagtttcctgcaattgagtcaataattgatcattggcttgtagtaaagctagaatggaagcagttgtttggtcccagtctttcatattttgctttaacttcgttaatatttgttcaacttctcgtttttccaaacttctgctcctcttttatgatcgttattattgttgacctacacccaactggctttgcatgtattgcatttgtgaatcagcttgcatcatgatcgagtctaactgggtaaactgtgcaatatattgttcccgtttatcggccaaacgcgcggtgaagtcatcgatctgcgagttcaagtctttgaccatcttatcaatgctatcgcttttattagtaatgatcccctttttagtagcatcgttgctaataaattcattgaccaaactatttaatttagcagtatagcccgtgtccgtactttcgtcgaagctgtcctcaccttgaacatagaaaaagtcatggactttttccggtgaatcagcaagttgtgacttaaacttgtcttcatcaaggctcaaaacaccatccttgtcaacagaaaagcccatatcgaagggactcagactagcgccattgtctttatcggcttgtgtgatcatatttctcaaagatgactgtagccgttgcagagtcgaatcgccaaccagcttaccttgaacattagtcgaagaactatccgctgtggaagctgacgggttgcccacatccaagtcacttttgatcaaactcattaagttattgtattgtgttacaaaatcagtagcggccttgactgttttagaatcatcattcttcaaggataaagtgacggcatcttcaggcttgatctcttttttcaaggtgaccgtcgcaccatcgatcgcatcagagatcacgttactatcactttccatgtcaatgccgtctaggctatacttggcagcctgacccagatcagcggaagtatttaagcccaaggcagctaaagtagctgtattctttgtttgatccagtgttgtttctttagcacctgatttgttattcgtcaaaactaggcgtttgttgatcactaccgccgaaacaccaatattttttgattctttattgatcttatcagcaatatcgagtagtgaatccttctctgtaatatcaatatcaacagtttctgggctatcgtcagttttttctccttgataagcaaaagtcagtttaccgttcaagttaagatcagtgctattcgtttctgctgcgctgacctgactgcccgtcaacttagtttgcttagctaattgactgaccaaaagttcaaaatcaccgccatttttggcgtcggaatttcctgagatcgttgcaagatcttcattcgagcttttagcaattttagaataatagctgtcattattctgcaaggatttaagcttagtttgaaaattacttaaagctgatgaaatttcactccaggcagacttttcctggttatattttgtaaccttattttgtaacagcgttttaccgccagattcagcctcgatcaactgatcaacaacatccgttgtgatcccagagtactggcccaaaaagctgagccctgcatttggtactgaggtagcacttgtaatatcagccatttacgtcactatcctttcttatcgaccgcaattcccatctgatcccagatttttcccaaaacatcaagcattttatgagaaggaatctcctttaacactttaccgctttgcatatccaccatttcaacgtactgccgtccggtccgctgatgaatttcgaatttcagtttaaaatcgcggcccagtaactttttattcaatgtatcaactgctttttgcagttcttgcgggtctacgactacattatcggctgaatcctcgacttctttaacgtttttaccatcatttaactgaaaaagtttacccaaatacttttcctgatctttacgaatgaatgattcgtccattaatgaagtatccatttcataactatcagttgcaactttctggattttattaacagccggcgtggggtcgactggtggaatattattgatctgcatgttacctgttccttctttctgtgtcttacatatattcactccaatatttctaattgaattctcttttgatttagtcaggctgcacaagtcaacttctttcggcttatctacgcactagacttcgatgccaaaaacgtttcaaagtcagatgttccgataatgctcagcttctgcccgcatttctctgccttgtttttcttagtcaggttgcgtgaaccaaaagtctgtgcctagctaacttcaacaacaagtcgcaaaaaacacgacttattgttaaagtccgctagtgctcgacttttaaccggttcactccaccttgttattaaaaaaaacgaccgccgaataaacgacgatcggcttaattttaattttattagccttgaagtaatgacaagacactgtttggcattgcgtttgcttgtgccaacattgatgttgctgcttgtgaaaggatgtttgacttcgtaaagttcatcatttcttcagccatgtcaacatcttcaatccgtgagttagcttcagaaagattttctgttgttgttcccaaattgttgatcgtatggttcaagccgttttgagtagcaccaagttcggcacgctgatcagaaactgtgttaattgcatctttaatcgttgtgatagcttttcgtgcatcttctgctgttcccaagttaattttagcgtcaattttagcagaaccttcaatgttatgctcttcatccttttcaactgcttttatatcaccattaacacctagggcaacagaatccatttttttcaatgtaactgtatctgtttgactctcgctcgcaccaacttggaaagtaagcactagatctttagacttcccagcgtcatcaccatcaccaattaacaattgtttggtattaaattccgtatttttagcaatgtcatcaatgtttttttgcagcttagaaatttctttagtgatcttagtacgatctgaatcagtcaaagtatcattagaagcttgcactgccaaatcgttcatccggctcaagatgctatgcgtttcactcaaagcaccttcagcagtttgaatcaatgaaataccatcttgagcattccgtttagcctgcttcaagccaccgatctgcgccttcattttttctgagatagccaagcctgcagcgtcgtcgccggctttgttgatccgtttgccggatgaaagttttgccaaagaatcactctttgatgcattggctgcagataaacgtgaatatgtgttcaatgcagctacgttagtattaattctcattttaaaattccccctaatattattgtaggtcgtttatatttactaatatcggtgtttattccaaacatttaagtgctaaattaaagttatttttctttaaaaaactgcccgtttctttaaaaaacgagtaactcaaacaaaccaaacaaataatttacacttcaatcaagcttttaataattcaaattattagccttgaagtaatgacaagacactgtttggcattgcgttagcttgtgccaacattgatgttgctgcttgtgaaagaatgtttgacttcgtaaagttcatcatttcttcagccatgtcaacatcttcgatccgtgagttagcttcagaaagattttctgttgttgttcccaaattgttgatcgtatggttcaagccgttttgagtagcaccaagttcggcacgctgatcagaaactgtgttaattgcatctttgatcgtcgtgatggctttctgggcatttgctgctgaactcaagtcaattccaggaacagcatctttagggcctccagcttccgagcttttattaacacccagtgctgttgaatccatttttttcagtgtaactgtatctgtttgtttctcgcttgcaccaacttggaaggtcagtgttaaagtatcagatttttctgaaccatcagcgttctgttctccgattaacaacttcttagtgttaaattcagtatttttagcaatgtcatcaatgtttttctgcagcttagaaatttctttagtgatcttaccacgatcttcgtcagtcaaagtatcgttggaagcttgcactgccaaatcattcatccggctcaagatactatgagtttcactcaaagctccttcagctgtttggatcaaagaaataccatcttgggcattacgtttagcttgcttcaagccaccaatctgagccttcattttttctgaaatagccaaacctgcagcgtcgtcgccagctttgttgattcgtttacctgatgaaagttttgccaaagaatcactctttgatgcattggctgcagataaacgtgaatatgtgttcaatgcagctacgttagtattaattctcattgtttgttcccccgaatattttgtattttgttgcttacaaatatatatatcggttcagttttaaattgtttaagtcattttagaaattttttccgaaaaaaagagccccatcttttgtgatgtgaccccgttcttgttatgaaatcaatttaataccagtgattcttgacccaatgtttctgtgcattagtccaactgccgtatctttgttggacatattgagccgcaactttttcttgattggcaggtgaaaaatcaccatgcaaataattttgatccagctgatatttgccaatatagcgtccatttcgagcattatagttattgctcgactcatgctgaataatataatcacgtgcacttttttctgccccagccaatgttggctctaaactgttgctagaactggcagaagcgttctcatcaaggtcaacattcgctagtgacgctactgttccagcatcattgaccatagaggtcggttgcgcagccgcacttatttgtgctcttccaggaatagttaagttctgtccggctagaataaaatccggatcgtttaactggttagcctgagcaacagcttgtgtagtggtgtgatatttctctgccaactcagagacagtatcgccctttttgattttgatcgtttgttgtgctgtttctaaagcattcgaaaactcagctgcttgctgcgaattagtcgcctgtgttgcggcttgcatcgacccattattatgaacttgcaggtcattattaactaaattcatttttaaaacccgtttccttctttaattactatcacgattcctaattatatagtgttttaaaatattttacagtatctttttaatatcgatcgaattaatttgcttttcccagcaattatattgaaattggctactaagtgggtaaaaaaaaccgttaaccaaccattagcaccctaaaaaaacctaggtcagacaaataatagttgtctgacctaggcttttaaagtgataatttaatcgtttgcgccacagtcttaggaataccgagtgcttcgagttccgccactgaagcttctttgatatgtttcatcgaaccaaaattcttcaagagtttcgtccgcgtcttaggaccaacccccttgatgtcatcgagtttagaactcaacgaattcttcccgcgtaattggcggtggaaactgatggcaaagcgatgcacttcgtcttgaattcgcgttaacaagtagaagccttggctctttggatccaactgaatggtttgatcaacttccccatataacaacgaggcggttttgtgatgattatccttgaccatccctgcaacgggaattgatagccctaattcgttctctaagacgtctttagccgcattgagctccacaattccaccatccattaaaatcaaatcaggcagtggtttatcctctttgagcaatcgcgaataccgccggaaaatgacttcccgcgtattggcatcttcgttggcgcctgcacgatctgtcgtttgcgttaacttatacttgcgatagagtttcttctcggcacgaccatcaacaaacgtgaccatcgctgagacaggatcagtcccttgaatatgcgaatgatcaaatgcttcaatgacgtggccatgtggtaagccaagcgcgtccataatctcatcttgcgccccaacggtcttgcggttgtcgagttccaataaacggaacttctcttccaacacaagccgactatttttctgcgccatttccatcaaagcttttttctcaccacgttgcggcgtgcgaatcggcacattcaaaatttcggtgaggactttcttttcgaccccttctggaaccagaatttcgcggggtaacacattattcttgcggttgtaccattgtaaaataaaggttgccaattcttcttcaggtgtgctgacacacgggaagagccgcttttcacgccgaatcaaccgtgcttggcggatgaagaagatttgaatcgataaccagcccttatccaaataaaaggcaaataaatcgcgcggggtattatcgttagaaataattttctgcttttcaacggtggcttcaatgtagtggagttgatcgcgcaattctgcggcgcgttcaaactgcatctcttcagcagccgtagtcatcttggccgtcagttcttttttaaccggatcaacttgcccattcaagaaacgtttaatctccttgatttgggccgcatagacactctcaggcacttctttgaaacacgcgcccaaacattgacccatatgataatacaaacagggccgcccttgatgtccctgacagcgtcgtaaaggataaacccgttgtaagaatcgcaatgtttcttgggcggcatacacgtccggataagggccaaaataaaagccgccatcttttttgacatcccccgtgatcagtaggcgcggatcgcgttcattcgtaattttaatgtaggggtagcctgtgccccgcttaagtttaatattaaagtaaggttggtgtttctggattaacgtaatttccaacaaaaaggcctctttatttgtcgatgtgatgattgtttcaaaatcgacaatttcagagaccaatttggccgtttttccttcgtgactactcttgaaatacgagcgcacgcggtttttaagattttttgctttacccacatagataatcttggcattgatatccttcatgatataacaaccaggtaatgcgggtaagagtgctaatttatgttcaatgtgttcgcttgccaaaaacaccactcctttaattcaaaacaagtgttcgtctttctattttacgtgtttttggctaaattgcaactattgtgctaggaccttggctaaaaattgttgcgtccgttcttcttgcggatggtcaaaaatggcttcggggtcccctttttcaacaatttgactatctgccatgaaccagacttcatccgccacttcgcgcgcaaaccccatttcgtgggtgacaacaaccattgtcatcccttcttgtgctaagtcttgcatgaccttgaggacttcgccgaccatttctggatcgagcgcagatgtcggttcatcaaataacaatacgtcgggtgacatcgctaatgcccgcgcaattgcaatccgttgtttctgcccaccagagagttgatcactataagcatccgccttatccgctaaaccaacgcgttcaagcaacgcttttgctttagccgttgtttcggccgctgattctttcttcactttttgtggcgccaacattaagttatcgaggacagttaaattggggaaaaggttaaagttttggaaaaccatccccatctttgtccgaatctgatcaagctgtttttcagataacgtcatcaaatcggtgccttcaaacagaatttggccactcgttgggtcctctaaacggttcaagcaccgcaataacgtactcttacccccaccggaagggccgatgacaacaatcacttgaccagcttggacttcaccactaacaccatttaacacgaggttgtccccatattttttaaccaattgattaatcttaagcatgttgcatcttcctttccacatagttcaaaagtttcgagagactaaaggtcatgataaagtagatcaccatcgcaacaaaaatcggtgcaacgcctttataagttgctgattgaaccactttgagttgataaattaaatcagtgaccccgataatggaaacgattgaactttccttgattaaagaaatgaattcgttccctaaagcaggccagatattcttcagggcttgtggtaaaacaatgtaacgcattgtatcgcgttgtgacaagcctaaacttcttgaagcttcagtttgcccagcatcgatcgcattgatccctgaacggataatttcagcaacatacgccgcactatttaaggaaacggcaattacccctgccaaaagtgctggaatgttgacccataagccaatcccgaagtagacaaacatgatttgaatcatcaacggtgtgccccgaacaaattcgatatacatgactgccagcgcacgcaccaacttattcttggccaaacgcccaaaggctaggaggaccccaattaaaatcccaattgcaattgaaacaatcgtaatgaataatgtgtagccaatccctttagcgaagtatgcccaatagtgccacatgctagtgttgtgcgtattgaccttcatgagttggcccgcgttctttaagtattgcggaattaatttttgctttttaatttgcccgatactcttattagcagcagcgactaaggttggcgaatcctttggaaaggcaatcgctgatccttgcatgtctgcgcctaaatcaaatttcccattaatctgaacgagttctggatcattacttgcataggcggttgcgactggttcttccgccacaatcccgtcgattttatgactctttaatgcaaggacgagatctgggactttggccaagcccgtaatctgcgcatctttaatttgctttttagcgagtgtttgttggagactccccgtttggacccccatttttttcccgttaaaactatttttggagtggtaaatcttcgcatcagctttattgactaagattgattgaccaccgagataataaacatcagaaaaatcaacactcttgcttcgttcatccgttggtgacatcgccgaaataaccatatcgactttaccggtttccaaaccaaccaataacgcatcaaagtccatcgacttcaccactaacttaacgcctaaatcatcagctagcttctgtgcgacttgaatatccataccgacaatcttgttcttaccgtttttattcactaaaaattcataaggtgcataatcggggctggtccccaaaaccaacgtttttttagcttgcacttggctaaccgtctgtccagctgccaaaacgggctgctgctgaatcatgaaaaacgttaacattaccatgaatggtaacccaacaaaagtgagtaattttttaatcgtcatattatctcctcctctgattaggactatcatacaacaaattaaataattatgcaatatttatttataaaaagtgaatcattggcgaaaccgttattatctggtatgatagatgcaaattagaaaagagggattacgatgggcttaaaagtcactaacaagaccgatttaaccggtttattcgataaattcgcatcactaccagaagaacgccaaaaagttgaagcacaagttgaagaaacagctgataaattaaaaaaggtagatgcagaacaaaaagaaaagcattaaacaaagacagcaaaaaaggcggtaagacaaattcatttttgtcttaccgcctttttgctggtttaaacgtgcgtcatttgcaatcgcctttcggttaacgcgattgtacgctttattctgcgtgtctttctgggtagcgttgttttaattgttcaatgttttcgcgcgcgactttatcaaagtcgaggttattccattccgcaatttgtgataaataccaaagcacatcgccgattttcttagacatcattttttcatctagttcgtggccttggaacgcatattttttaacgatatcaaccacttcaccactttcacttgctaagcccaaagctaagttagttaacacttgttcgttaccatataacgttcggttggctaacttttgatagtcattaaattccattatgcttgtccccctattgcacattgcttttcaatccattcccaaactgtctctttaccagcaccagtcagtgcgctaaagcagacaaattgatcgactggattaaaatcaagcgcttctttgatgattttttcttgacgattccatttccccgttgagatcttatccatcttagtagcaaccactaaaacagggatatcataatacttcgcaaaaacgtacatcgcgatatcatcatcggttggttcgtgacggccgtcaattaatgaaataagcccctttagatttgagcggctggttaaataagcctcgataatttgcccaaacttctcacgttgcttctttgaaactttggcatacccataaccagggacatcgacaaagtaaagttcgttttcaacgcggtaaaagtttaaagtctgtgtcttacctggcttgctagatgtccgggcataactcttacgattgattaatttattaatcaatgaagacttaccgacattcgagcgaccagataacgcaatttcaggtaattgatcagttgggtactgcgaagcagctaccgcactcatcaccatttcaacatcatgtacttccataataacctccgattatttccttcgaatgttagtttagcataaataaataattattgcgccgttgacatctctctagtttcatggttaacatatcttcttaaccccgttaaatcgcgtcattgtaccgtttcaaaagtcccttaatgcaaaaaaactgccgcgacaaaatctaatttgtcccggcagtcttttaatttttatgacgcttcttgtccgtcagctaaaaagagttgtgggttggctgtgccatccaccgcttctttcgttacaacaactttagccacgtcttcacgacttggaatatcaaacatcatatccatcatgacttcttcaatgatcgaacgtaaaccacgggcccccgtgtttcgttcaatcgctagatgtgcaatcgcatggagtgcttctggtgtaaattctaattcaacattatccaaggccatcaacttgctgtattgcttaacgagcgcgttcttaggttcagttaaaatatgcaccaaatcatcttcagtcagtttttccaatgcagcggtaatcggaatccgaccaatgaattcaggaataatcccaaatttcattaaatcttccgttacaatttgttgcattaagctttgatcttcattggtagtttgaccattcttgcttccaaaaccaattgtcttttcacctaagcggtttttaacaatcgtttcgatgccgtcaaaggcgccaccaatgatgaataaaatattggtcgtatcaatttggattaactcttgttgtggatgcttgcgaccgccttgaggtggcacactagcaatcgttccttcaagaatcttcaagagggcttgttggaccccttcaccagagacatcacgcgtgatcgagacgttttcactcttcttggcaatcttgtcgatttcatcgatgtaaatgatcccgcgttcagcacgatcaacatcgaagtctgcattttgcaacagcttcaagaggatattttcaacatcttcacccacgtaacccgcttcagttaaagtcgtggcatctgcaatcgcaaatggcacatttaaaatccgcgctaaggtttgcgcaaggaatgtcttcccggaaccagttggtccaattaacgcaatattactcttttgtaattcagtatcgccttcttcggccactgacatttggttgacccgcttgtaatggttgtagactgcgacagataaagcttttttcgcttctgtttgaccaatcacataatcatttaaaatggctaaaatttcttttggctttggcacttctagtaaatcactgaaggcctcatctttaaactcttcatcaataatctctttgcaaaggtcgatacattcgttacagatataaacaccagggccagccacgatctttttcacttgatcttgcgacttcccacaaaacgaacacgttacgggtccgttagttgtttctgtatcatctagcatactgggattctcccctttctcgatatacgcttaccgctgtgagtcgttaaaatacacccctacaacgtaattcagactatagcataactatggtctagaataaagtaaagttactcgcacaccgtcaatgacacaaaagcgggtccaaagtaaacaccttgaacccgctttttagcatcatttaaagcttggattgatcagacgaccttatttagcgtctttcacttctacagctgaatcagcaatgatttcgattgctttcttaacaccgatatcatgttttaacatgtcatctgataagacgctacgaacagcagcttcttccatattgtattgttcagctaaactcttaagttctgcagcaacttcttcgtctgttgcttcgatgttttcagcttccacaacggcttcaagtacaagacttgtcttaacgcgtttgtcagcatcaccagcgaattgtttcttcaaatcatcttcagttgtaccagtgatttgatagtacatctccgggttgataccttgttgttgcatgttacctaagtattgttgtaattgactgttgatttcttcgtcaatcattgcttgaggtaattcagcgattgttgcattttcagttgctttagcaacggctgtatcttggatagcagcatctgcagcatcatttttttgttgttttaattcttcacgaattttttcttttaattcgtctaatgtatcaacactttcgtcgatatctttagcaaattcgtcatctaattcaggtaattccttagctttcacttcatggattgttaccttgaagatggcttctttaccagctaattcttctgcttggtaatcttcagggaaggttactttaacatcaacgttgtcgtctgctttgtgaccgactaattgatcttcgaaacctggaatgaatgaatttgagccaagttctaatgaatagttgtctgcttgaccaccatcaaaaggtacgccatctacagaaccagcataatcgatgacaacagtatcgcccttttcagcagctgcgtcttcttttaataccaattcagcttgacgttcgcgacggttttcaatttcttgatcaacgtctttgattgtaatgcgacggctttgttttggtacttctaagcctttatagtcgcctaaagttacttctggtttaacggtgacttgagcagtaatcacccaaggttcgcctttttccattttttcaacattaatttgtggttgatcaactggttgaatagcagcttctttaacagcagcatcataagcttctggtaagattgcatttaaagcatcttcataaagggcttcttcaccatacatcttgttaaagatttggcgaggcattttacctttacggaaacctggtgtgttgatatttttacgtacacgtttgaacgcaacgtccaaaccttcactaattttacttaaatcaatttcaaaggttagttcaccatcattggtgccctttttttcccattttgctgacataatttccctccgacagttatattcacaatctatcaattgcatacttaatcagcataaactatttaacctaaattgtaaatatttattggtctaaaaagcgataaaatccgatattttagtcgtttcaggccaacttttatcgaatttaatgcacaaaaaaactcgcagtttttacactacgagtttttcgattcaactaggttgaatattagtcgataatttcactaacgacaccggcaccaacagtacggccaccttcacgaacagtgaacttaagacctttttcaatagcaactggtgagattaattcaacagtaaatgttacgttatcaccaggcataaccatttctacaccttctggtaattcgataacacctgtaacatcagttgtatggaagaagaattgaggacgatagtttgagaagaatggtgtatgacgaccaccttcatccttgctcaagatataaacttcacccttgaagtttttgtgagtttggattgaacctggtttagctaaaacttggccacgttcgatgctatcgcggtcgataccacgtaataaagcaccaacgttatcgccggcttgaccttgatccaatgtcttacggaacatttccaaaccagtaacagttgtcttagcaacttcgtctttcaaaccaacgatttcaacttcgtcaccgacagtaacttggccacgatcgatacgacctgaagcaacagtaccacgaccagtgatcgtaaatacgtcttcaacaggcatcaagaatggtttgtctgtgtcacgttctggagttgggatatattcgtcaacagtagccattaattcttcaacagctttaacgtcgtcagcattgccgttcaatgcaccaagtgctgaaccgcggataactggaatatcgtcaccagggaaatcgtattctgataataattcacgaacttccatttcaactaagtccgttaattcgtcatcatcaactaaatcagtcttgtttaagaagacgatgatgtagtcaacaccaacttggtgagcaagtaagatatgttcacgtgtttgtggcatagggccatcagttgcggcaacaactaagatagcaccgtccatttgagcagcaccagtgatcatgttcttaacgtaatcagcatgtcctggggcgtcaatatgtgcataatgacggttttctgtttcgtattcaacgtgggctgtattgatagtgataccacgttctctttcttctggagcagcatcgatgtttgcatagtcttgagcttcagccaagcctttgtctgccaacatctttgtgattgctgctgttaaagttgttttcccatgatcaacatgtccgatagtaccgatgttaacgtggggttttgttctttcgtaatgtgctttttctgccattaaaacgaacctcctgtattttcgcaagaaaaaatcagtgtttagatttactaaactgataatcctttacataatattataatacttcaagcgctaaaatcaaagtatttttttacacttgaagaattcaaaaatgattatatctgctatgagcgcgtttgtaaacacttaatgctcaaaaaaagtcagttttgaaacgatatttaggtgttttctactctaaaaatcaagtttccctgtcatttcttgcaactttttcacccagtcctgtatcttttctgaaataaccactgacgcggtataatccggacccagtaactgtttgagccatgcttgcgcccactccgtaggattatacatgatttcagcttcaaaaggatataaatatgcaaatcccatctcaacatccgccatcacttgtgctaacaaagtcggatcttcagtggctaactgctcatttaacgccgctaacaccgcattaaacgtcgggctctcctccatcagttggatatcggcaggtacaaaagtttttgtctgttcaaaccattgcatcgtgactaattgttcaatattcagctggacgagcgtttcaatgacagtcgtcttcacgaaagcatgactgtaaggattcgttaaaatgggcgcaatactggtgacataaacattacgtggtaattgttcagcctgcgtcaacattgctagctgttcagctaatgggtgcgcagtgaggttatagaggccctctgcttgcttttgaatcgctgcttggtgattcgcttggtattctaattccgcagccgtaatcatcattctaagcgtcttaatgacttgcggggcaatcgtcgcatggcgtaatgcctcccacacttgatttgccgtaataaaacggtggttattcagtaataatgcaagataaaaccgcactaaatctgtttgttgtaagtagtccgcttgttgttcttcgacgattgtcaatgctgtttgcggatcaccagcttcaatcagcgcactggaccacaataaattcgccgacaacgtctgttctagttgatacgcagcttcaaaatggtcgcatgcttgctgccaattttgttgatttaacgctactttccccatccgtatcagccgatcatactgatctggaaattgcgtaatgtcatccattcaatcacttccttttgacaattaataaaacaatagcgcctagaatcaactgacctgatccagacgctattgtttctaaatgttattcagcggctttttcagcctttggtttattatcttttctttgacgacgatgattttgattaatttccataatcactggtagaatcactggccgacgtttcgtttgttcatacaagtaatgacttaagttttcccggacatcttgtttcaaatgactccagtcaaattctttgttgtccagattattttgcaccgcatttttgataatttcggcactctcagccattaaatctttgctagtcttcacgtaaacaaaaccacgtgcggtgactttcggttccgcgataatcttcttattcttgcggtcaatcgtaacaacagcgataaaaatcccgtcttctgataataatttccgatcgcgtaaaacgatattcccgatatcgccgacaccgctaccgtcaatcatgacgtcagttgcgtcaacttgtccgccaacatgcatcttccctttttcgtaagcgacaatatcgcctttaccaacgatgaaaatatctttgtaatccattcctgtttcatgagcaatatcagcgtgtgctgctagttgccggtattcgccttgaacaggcattaagaattttggttgcattaaattcaacattaattgcaagtcattcttattggcatggcctgaagcatgtaaatcatcgccaaccgccttaacttcgccacccgcacgataaatcatatctttggtcttcgctaaaatcgtttccatcgcgtgtgaaggagatgtcgttaaataaaccaagtcgccttcttcgatgtgaattaaacgatgatgactagttgccatcttttgaagcgccttgattggttcgcccatccgacctgtttctaagatcactgtttgttctggtgcaagtgtgcttaaatctttaggttggaccaagatatcgtcatctggcaaaataatcatcgataatttcattgctgtccggacgattttttctaaatcacgacccgttaaaaccactttacggcctgttttataagccgcatcaatgacttgttgaatccgcataatatttgaagccactgaagccacaatgatccgacccgtttgatacttgaacgtttctaagatggattcagcaatatcgcgttcgttagccgttgcaaatggtgattccgcattagcagaatcactcaagagtgctaaaacaccttgtttgccaatttcagctaagcgtgcataatccgtttgatacattggcattgctgattgatcaaacttaaagtccccagtataaacgacttgtccttcatccgtcttaacgacaatccctaatgaacctggaattgtatgcgttgtcttgaagaatgaaacggttgcgcgttcaaaatcgattgctgtattcgcatcgatgacgtggaagttttggaacttacgtaattttggttcgctgctaaccgtaattttagctaaagcaatcgttaattcagacccaaagactggtacatcatgttcctttaagaaataaggaagcgctccaatcgcatcagcatgaccatgtgttaggaaaatcccagcaacacggtctgcattttcttctaaataggtcatatcaggaataacgatatcgatccccaataattcagtttctggatatttcaacccacaatctaatacataaatttcgtcgtccacttcaacaatgttcaaattcttaccgttttcacgaacaccgccaagtggcataatcttaatgttactcattctttcacctctagcacttgaggaatttattccccaaactattttgtttgttttagtcgttcattcgtttaaaactcatccgccttaaagtctaactcatattttatcacaatttaaacaaactaacagcttttgattactaaaagccttttgagcacaaaaaaagcgggtccgcataacggacctgctttttgaaaatgaattaacgacgtaagccaaggctcttgattaattcacggtaacgttgaacatcgctttcacgtaggtaacgtaataagttacgacggtgaccgatcttcttcatttgaccaacatatgaatggtgatctttcttgtgaacagataaatgttcgtttaatgagttgatttctgcagtcaatacagcaatttgtacttctgctgaacctgtgtcgccttcgtgacgagcaaattggttaatgatttcgttctttttttcttgtgaaatagccatgctaatttccacccttctggtataatagcctagaacaacgtaaagcgtcgggtgaacgtcgctaaacagagtagtaggcctgtgcaataagcacttttcaagtttactaaatattagcgtcaaaagcaaggcacagtttcaaactatttaagcagtcaagttgaaatactttacaagtttttattgcaatcactctcactattttggtataataacgactgttgaaattaaaaatcttttttataaagatagtgaaacccatcggaggtgaacaacatgccacaaattaaatctgctatgaaacgtgtgaaaacaattgaaaaagctaaccaacgtaacgcttctcaattaagcacaatgcgttcagcaatcaaaaagttcaaagctgctaaaacagcaggcaacgaagaagctgcagacctattgaaagttgctacacgcgcaatcgatatggcctcaacaaaaggcttaatccatgccaacaaagctggccgtgacaagtcacgcttaaacaaaatgatggctaaataatttaaccacaaaaaagcccccacaaccatttggtttgtgggggctttttttgctttaagcaacatcatctgtcgcaaattgtaacataaacagttcaaacaataaggttgcttcaccttgcccagtctttattttttcttcaatgccctctaaacctagataggcttgggcaagcgtcgccttagaaaagtgccgaatttgttgcaatgctaatttgatgcggtatgggtgaatttttaagacgctcgccaaattaccttggctataccctttttcaaaaagaattttcacttggagtaacaagcgaaattggcccaacaagatggcgttaattttcagcggttcttctttttgtagcaataaatcgtgatacatctctaaaaccggaccgacctttttttgtaaaactaacggcaccaattcaaaaacattatcttcaatactacttgccactaatgcactaacggccgtttcagtaatcacccggctttgttgcgcgtaaagcagtaatttgggtaattcagccataatctgactgtaatcaccattagtcttgcttaacaataacgtcattgccgctggttcaatcgtgacttgttcactttgcagttgcgctgtcactaactgctggacctggcgctcattaatcttttgaacgtcaatgacagttgccatcttcttcagttgtttaacaatcttcttgcgttcatccaacttcgcgtatggcgcgaagataacgagtgccgttgtcggttgtggctgttctaaataagcttggaatccttttaaatcatgatcaagtttagttttaactttttcacctgttaagaagaatggattctgcataaaaacaattcgtcgctcaccgaaaaagggggccgattccgcatcttctaatgcccgcgccacctccgtctgggcgagatcataactcgcaaagttcatcgtcatttcttctgtcgaaagcgttgctttaaataacgctctaacctcttcaatcagcgctgactcttgtcctaatacgagatacaccggtgcaaatgttcctcgattcagtgctgtttttagttgttctgtcttcatttagtcacaatcctttagtgttgttttaatcattggcacttggccaaaaccatagcgccattccagcatcccacagtcagccgtattccaaaatgggacgttcgcacgttttaaagtctgcaacgttgcggcatgtggatgaccataacgattatggcgtcccgcagaaatcaacgccccttttacctgccacgtcgcaattgactggggatcactcgccgtttgactgccatggtgacccacctttaggtaatcaacgcgtaattgtgggtagcgatcaacgattgccacttcacccgctttttctaaatcaccagtaaataaccaactcgcaccaccaatttgcgtttgcaaaacgagtgagtcagcattcccgcctggtccggccaccactggcgctaacacattgatttgttggtgaccaatcataaaatgttggtccgccaaataaggctcaattgcaacttttgtaagatgcggccgcacttgccgttgaaactgccggttttgcggtaagcccgcagcacaaatcaaccgtttaactcggatatgttgcataatttcatttaagtcccctatatgatcagcatcctgatgcgataatgcgattgcctctaaatgatcaatgccacagctgtagaggtaattaactgttactttttccgcccgactcacaatttgccgccgttgccacttttcttgcggtaaagctagtcggccgccggtgtcaattaacaggttatgtcgattgaagggttgttgaatcaacaggctatcgccttgcccgatatcaaacataatcacgcggccaaccggattaaagtggataccaataaaactaatgacatacaggctgataacagccccccagccccactttgctcgccgaccagtacttgccatcaaccatagtgtgcctatcacaattaaaaagagtggtattagctggattttaccgaaagtaattgtcgcatatgggaacgttgcaatccaagctaatcctttatacagcgtcgttagcaggccttcttctaaccaaactatcatatgactaacaggccataagcaaatcgctaccataatcaaacccaacatgactggtaagaaaatcggcgcgacaatcccattaatcaaaatcgtcaagatatgccaacgataattaaaccgcaagcacaccggtaaacttaacaagcctagccaaaatgccgttgtaaaagtaccatggcgccgctgataaatcaatccaaaagccatcagatagctcagcaatccccccatactgattaataaatacggctgccataaaagattgaccagcaatacccaactccaactatctaaacgcgattgctgaaaatgacttacttcgcagattaatcgtagtaagatcagcccgatagcgcgtgtaatactcgtgcctccccccacaaacaacgcataaaggggtaacaaacaaaacaagctaacattcacccattcacgcgggactcgacacagcgttgccaatcgacgaatgattgtcacaaagtagaatacatgcaatccggataaactcaataaatgaataatccccaattgacctaacacattctggtaggccaggccatctgactctcgaacaccacataacaacgcctctgcatgaaaactcaacgctggtggcaattgtcggagataaatcagcccctgttggcgccgttggtggaaccaatctagccaaccttgtggtggaatgcgtctaaagaccgttccgtcaattatatttgcttgataaaaacaatgcttttgctgccccataaagcgcgcatagtcgaactcattccggttagtagcaccttggatacgctctaattcaatatcacccgctaataataacggctgattcgtcgtttgccaacggcgtttttccgctgaactctggcagcgatagtagcaaacaacacgttggtcatcattctgcccctgcgccattaattgaatctgatcgccagccactttgatcgtatcgggttgaatcttatatacttgattatttggtctaaccggctgttcgtaggtgcgccgtgccagccaaaaatggcaaccgcctaaacacagtaccagtccactgaccattaacacagctggttggcgtaagcaccacagtcgcagtagacacactatcaaaagacagctaaaaaaaagtggtgcttgtcctagtaataacgcatttaaacttgctaaacaaataactggataaacccagttattcttaatcactcagcagtttgttcattctccaaaaagttaacgagggtgttggcgtcattcgccgttaaatcgacttggtccaattcaatactagatttttcaatcaattcatacgcatattcgtcgttatgataatccttttgataatggattttactgatcccagcttgaataattaatttagtacactgaagacatggaaaatgtgtgacataaatttcggccccttccgtctgcacaccaaacttagcgcattgagtcaaggcgttcatctcggcatgaattgttcgtaaacaatgcccgtcccgtaataaacagccaacatcgatacagtgactttcatgtgccaccgaaccgttgtagcctcccgcaataattcgccgattacgaaccaccaacgcacccacaaacaatcttggacaggtgctacgcatcgacaacaagaccgattgaagcataaaatattgattccacggcattctcttttctgacacacgaattccccctttaaagttaatagttttagtatagcaaaaaaataccattcacaaactaattaacacaaatttgtggccgtaattgttcaaacgttttcggcccaattcccccaactttttgaagatcttcgatttgtttaaactgcccttgctcatcccgatatgcaattatttgttcagcttttttaggaccgatgccatttagcgtttgcaattgtgtcgcatccgcttggtttaggttgattttagcatcagttgatatcggactggctcccgcttgattgtcagtcgcagcctgtggctcgtctgccgctttcactaattcttcggcttgcaccgcttctcccttagttggcacatagataataagttggtcactcaatgtttgcgctaagttcaactgactcgtatccgctgcttcggtcacatcccccgcttgtttcagcacctcaaataaacgcgtctttgcaacacaaatcggataaatccctggatgtgccacagcgcctttgatatcgacaaacccaccttttgagacgcttttcttctgtttgacgggttttgccttcacttttcgcttagttgattgcgccatcaattgttgattggttgatagaaaacgttgttgccgactatgctgccaaaacacaccaccaccaagtaaaattatcaccaaacaaggtacccaccagaatcgacgataccgttgccaatagtcgcgccacatttttcgccacctccttattcctaattaccccaaaacgcaaaaaaaatttgccgattctttcgaaccgacaaattttttaatgtttggctaaataatccaatgcgtcgtccaagtttttgacaggaacgattttcatcttagtaccaatttttttagcggctgctttggcaatcgcataattattttgataatggggttctacctttagtatggcttttgtcacgggatcatcaggtgcgaaaaagactttggcgccttcttgactcgcaatcagtaccttcttatcaattccgccgattggtcccactgtcccatcaggatccattgtccccgttccagaaatcttgcgaccacccgttaagttttgtttcgttaattggttataaatctgtaacgtaaacatcaagccagcagaaggaccaccaatttcacccgcatcaatcttaaccggcacttttgtcacaatttttgagtgatctgtcagcgtaattcccaaaccagcgtagcgcgatttaggtaatttaatcaatttacgggtcgcagtcttacgctggccattatgttcatagctaatcgtgactttttgattcactttaagcccttgaacatacttgacgaacttatttgcactcttaaattgatgctgatcaattgccgtaattgtgtcaccaatagccagatcttttttaaaagctgaattatctaaaattgacatcacatagacacccagatattgagtgtggtattcctgatgtgccttttgataagccgcctcaatcgcaaaattaatcgagctttccatgtagtatttttgaatctgatcatacgcttcagtatcatcgtcacccattagttcatcacgactaataatctccgtaaaaggttgtgttttagacagtaatagctgtaaccccgtcactggtccttgaatcccgacggttgttaacataaagtggcccttatgttgatctcgttgaccgttaactttaacaaactggttggtattttcggccgaaccgaccccttcgacgtaataatgcgttgggataaagcaaaaagcaaacacgacgatcaagccaacaatccataggagatgcttcaatagacgtttattcttattcatattaatcactttcaggtcctaatttttgtgcaagcgcagacgcgacaaccggcggcaccaattgttcaacctgcccaccaaacgttgcaatttccttcaccatacttgatgaaataaaagcaaattcttgctttgctaataataacaccgtttctaaatcagcatcttgtgtctgattcaacgccgcaatatcacgttcatgctcaaaatcattggcattccgaataccacgaatcaaatatcgcgcaccgacttctttagcaaaggttgccgtcaacgtcttcgattgtgcgattaccttaacgttatccaagtgttgcgtcgccgcttcaatcagttcaaccttagtagttgcgtcaaataacggttgtttagcagcgttagtcattaccgcgataatcacttggtcaaacaagtgacttgcccgttcaacagtatcgagatgcccatttgtaaacgggtcaaaacttcccggaaataatgcaattttcggcatatagctgcctcctaaccaataaatttaaagattgctacttctgtaatcccataattctgttgccgtttcagtatgtaatgcggaatgtcagttggataatcaaccgtcgtatcggtttcgcaaagaatcgtcgcgtctggtgctaataaccccatttcgacgaattgttgtaactgaagcaacatctgttgttccttgtagggtggatctaataaaattaaatcgaattgaacaccagcatccgctagtttcaccaacgctttttcagctggcatcttccagattgtaaagcattctggcattttagtaaccgcaacgttttcttcaatcgtttgaatcgctgcatattggcgatcaactaaataagcatgatccataccgcgtgaaacggcttcaattgcgagaccaccgctaccggcatataaatcaagcgcctgcccaccgtcaaaaaattgccccaacatactaaacattgcttctttaaccttgtccgttgttggccgtgttttcatcccagggacagcttttaacttgcgacccccaaattctcctgcaataatccgcatctctattactcctctaattctgccgcatcggcaatttcttgatctgagcgtcctactcgattactgaaatccatatcaatagctggtctttcagaaggggtcactcgtttgacgtagtgtaatttttttaaccgttgcataacagtttcggcatctgccatatctacgtatagataaacatatttcattcgtttcgaggtgtaatacacaagtccgtaacggcgtaattgctttacttgtcgtaatgaatagagccagacgacaattccttggcgttgtgtgatttccaatgtcatttaatcagtccttttacatttagtcaaaaatcatcattgtttgttcatcggtacacagaagcgttaagtgctgatagcttggattattaatcgtaagttgcaacgctagattctgttgttgcgcaagcaccagcccttgggaattgagcccttgtggccaataaaaaagttgctcgcgctgcggaaaacccgctgctcttaacggagcctgtttaaagtcggttgctgttaaaaaggcgtccgtctcttgtgtcgcttgtttgcgcacttggtgcagcttttgcagtccctttttagtcaaccactgcgttggtgtacttgttaattcactcaccaaattctgtgtattttgcaatggtagttgatttatcgtgagcgcaggttggtcattattttggcgtaatgtctgcaacgtttgcaccaaagcgagttgtcgttgactatctgtttgcggttgttgcgactttgatagctcatccactgggactggtgtttttgaaacaactcgatataaatcagtttgtagcagtcggttcgcatttaaatacatcacagctgtcaatcgttcttgctgcatcactaaagttgcaaacgtctggtttttaaacatcactaacggcgtttgttggtgttgctccggcgttaaccgcaacttaaattgttgctcgtgtaacgtcactaagagcgaagttggtaacgccgtcttcttagttaatgtagcccgcttttgaaaaaaatgaaacggcgccacatcgttgtccgcaccaacaaccatgatttgttgtgtttgattggattggttatcaatcagcgcttcgacatactgtcggctatctaagtgaaataaccaccgtcgttgattttcatcagtcagctgttgctcgaccggttgcccataggttgcaattaattgttcagctggttgattaatcagtttcgccggcccttgtgttttcgtcagtggcgtttgttttattgaccgttcagtcgacggggcttgtgcaaccttaggctgattaaccgctggtgtttggataatcggccaaccataaaggatgaccaaccagacaatcaatgcaacgattaatcggcgtgccccttttatcatgctttcacctcactaattcgctgccgcagcttttttctcttgtgcgctgatgttcagcacgattcccagtgcaatcgctagaaccatcatacttgatcccccataactgatgaacggtaacgtcaccccagtaatcggtaagattcctagcaacccaccaacattgaatagggtttgcacgaaaatgatagtgccaattccgtaacataataaagtgtgatacatcttagtcgcatgaatccctaggtaaaaaatccgtgctagtagcgcaaatagtaacgcgataatcacgagggtcccaatcacacctaattcttcagtggtaatcgataaaataaaatcggtatacggttctggtaagtaaccgcgcttttggatactattgccaagccccaagccaaaccaaccaccattattaatcgcatagtaggaattcactaactgactcccacccatattttccaattcaaatggatgtaaaaacgataaaatccggttgaacttataagaattaacgttcgttgaaaagttaaagtgccgtaaaatactaaataaaatcataaccgttgttgtgaccgctgtaatcagcgaaaaaccataccaatatgacataccggtgccaaaaaacatgactaccatcacagcagccaagatactagcgccccctaaatcaggttgaataaacaccagtaggatgattccagcgactaatacaaccggactaaagaataattttaaattatcaacaaatccgtcggccagttcattttccttacgcgagagcatattagcaaggtaaataacaatcaataacttcgcaaattctgacggttgaatggtcagtggtcccaattgaatccacgcggtagccccattaatcgctgcgcttggtctgaaacgacttaacagcaataaataaatgagcgccaagaaaaccacaatcgtcattgcttttagaaaagtgcgattttttaaaacggataacttaagaaaatatgtgatcatcatcaagataaagcctaatgcgataaacactaattgcttggtaaaatacgcatctggtttcattccgcgaattgacattaaatccgaactcgccgaatagaccattaaagcaccaaatgcacataagataacatatggtagcaataaccaatagtctaaatactgaattttacttttttgaaactttttccacacagttacacctaatttctatttcgttcgtattcagcctgtccttgcccaacttgcatgccaatttgattgacccgttcttctaactcacgcatcaaagttgcaccctgtggcgcactaataagttgcatccgttttgcaaaatcaacctcgcgcgagaaaccaaataattgggtatcaattacctcttcaataattggacattgactcatacaaagcgcatcaatttgagcacgcaatagttgctcaatgcgtagcgcatccgcttctaaagtgagataagctgttgttttttgttcaatcataatttacgcctacctattcgttattaaaaagcatactctgttcgttattataccatatttatgcacaaaaaaaggtagccaagcggctacctctaatggtttttaatgattaaccttttttacgtttcttatcagctttttgacgcatacttgtgtcaagaatcttcttacgtaaacgaacagaagtaggtgttacttcacagtattcgtcatcgtttaagaattcaattgattcttcaagtgacatttctttaggtgtcttgatggcagctgagtgatctttaccagaagcacgtgtattcgttaagtttttacccttagtaacgtttacggcgatatctgtatcacggctgttttgaccaacaatcatgccttcataaacatcaacgccagcgccgatgaataattggccacgatcttcaactgattgtaaactataagttgttgatgaacccgcattgattgaaactaatgcaccgttacgacggcctggttcccagttcttaatcactggcatgtatttttcgaaggtatggttcataattccgtatccaccagtcatcgttaagaattctgttgaataaccgattaaaccacgtgaaggtgctaagaaagtcatccgtgtttggttattagcatcactttccatgttttgcatttcacccttacgttgggccattgagtcgattactgagcctgtatattggtcaggtgtgtcgatttgaaccatttcgaaaggttcgcatgtaacgccatcaatatcgcgatagataacttctggacgtgacaattgtaattcgaaaccttcacgacgcatttcttcaactaagattgaaagatgcaattccccacgacctgaaacaatccaagcgccggctttgtcggtatcttcaacacgaagtgaaacgtcagtgtgtaattggtgacgtaaacgttcttcgatcttacgaccagtaacgaaatcaccttcacggccaacaaatggtgaatcattagcagcaaatgtcatttgtaaggttggttcatcaatccgtaagattggtaaagcctcttgatggtcaactggtgtaacagtttccccaacatagatatcttccatcccagaaacagcgattaaatcgcccgctttggcttcttggatttcaacacggtctaaaccgatgaaaccaaaaatcttagttacgcggaagttcttagcagaaccgtcaagtttaagaacagaaacttgatcaccgatcttgattgtcccacgagaaacgcggccaatcccaatacggccaacatagtcgttataatctaacattgccacttggaattgaagtggttcgtcactattatcaactggtgctgggattgtatctaagattgtgtcaaagatagggttcattgtatgggcttgtgtatctaaatctgattcaagacttgatgtcccgttgatggcacttgcgtacacaactgggaattcaagttgatcttcatcagcaccaagttcgatgaataattcaagcacttcatcaacgacttcttcaggacgagcgcctgggcggtcaattttgttaatcacaacgattggtgttaaatgttgatctaaagccttcttcaaaacaaaacgtgtttgtggcattgtgccttcaaaagcatcaacgactaataacacaccatcaaccatcttcatgatccgttccacttcaccaccgaaatcggcatgtcctggtgtatctaagatgttgatttgtttgccgttatatttaacagcagtattctttgaaagaattgtgatcccacgttctttttcgatatcatttgtatccattgcacggtcagaaatttctgcgtgaccatccaatgtatctgattgttttaacatttcgttaactaaagttgttttaccgtggtcaacgtgggcgataattgcgatattgcgaatgtcttctctttttttcaagtgtttcagcttcctctcgctagtgacttgactagtgttgtttgtctcatgtatacaagctattattttaccataaaaaaatgggctgtgcttcatatattagcgtttttttgaaaatacgcaagtttttttcatgaaaatttaattatctttaatcatttgaaccattcataatcgtgacaatttcttgtattgcttgctttggcgcgataatcatcccttcttttcgcatcatggaaattggttgaccatcaaattgtaaaacttgaaaacctaacgtctcagctaaaacccgacctgcagcaatgtcccatggcgctaatttggagatgtaagcttgcacttgccccttcaacaaatgggcgaaagtgataccggcgctaccgtaaatccgcacacccgaacattgatacaacacctcttgcaagtgtgcttcattggtgaccagcatccgtgtattgacacagattaacccttcttgcaacggctcgtcgacagcatttttgagggcagcttcgttttcgaatattcccaactgtggaccgccccagaacaattgatcggccatcacatcataaataatcccgaatagcggctgaccgtcttcataaacgccgatcataatggcgaaatttgcccgttgcttcacgaaattcatcgtgccatcaatgggatcaataaaaaaagttagtccctgttgccaatcatcaggcacctcaccggcaccttcttcccccactaattgcgcgttcggataagccgtcttaatcttttcagctaagaaagcttgattagcacaatcgacattagtcactaaatcattaggcccagacttagtactaaccgttaatggttgtttaatttgtgtgcgagtataggcagctgcttcaaggatccacttttgcagcgaacgacttaaccgatacaatgcttcttgttccattttttcatccactttcactaattaagcgtcattttgatttgggttcgactactcctctttgcagcctgcatacaccgatatattgaatagcctgacgcttctgaaaaggccttatcaatttttttttcttgcatcttactttgaacaaccactttgaagtcacgataagcagcttgtaaatccgcaactttcgcaccaaattcataagcttgttcaacaagattatataatttcatgacttggacaacttcagctggcgtccagtctggttctaaaggataactatagttcgtttgcataaaggctcctaaaatttgcataaatttgcgccagtttcaattcaactgatgccattaatctctcatattataacgcacttttttagaagctgtcgaatccttttagaaatagcggaatcaaaaaacgacgcactcaactggtgcgtcgtcattctaaactatttattaaatatgaattggcaatcctaatgctaattcggcatcatccataatcgcttcacttaacgttggatgtggatgaatggttagagcaaggtcttctgcattcatgcctgattcaacggctaacgtcaattcagaaattaaatcactcgcgccaacgccagcaacttgagcgcccagaactgtgttatcatccgtattcgtcactaaccgcacgaaaccttctgtatctgctaatgataaagcacggccattagctgcaaatgggaacttaaatcctttagcgttcattccttttgccttggcttctgcaaccgttaaaccggtcgttgccaactcaggatctgtataacaaacagctggcattgcgtggtaatcaaccgttactttcttaccggcaatggcttctgcagccactttagcttcataacttgctttatgcgccaaagctgctccagcaacgatatcgccaatcgcatagatgcccttaacgttagtttggccttgttgatcaacttcaatcaaaccacgatcagccatcttaataccggcttgttcgagtcccatttcgtcggtatttggccgccgaccaacagtcaccatcacgtaatcggcaacaagttgttcttctttgccgccgacttcatatttaaccgtcacattttgatcagtttcaacagcttcttttgccattgcgccagtaatcacatcgacccctttagccttgaagttctttgtcaccaattgcaccatatctttttcgaagttaggtaaaatcgagtctgtcccttcgagaatcgtcacatgtgcacctaagttggcataggcccctgctaattcagagccgatatagccaccaccaatgaccactaattcttttggtacttccgttaagcttaaaccaccagttgaatcaataacccgtttattaaatttgaagcctttaatttcaattggacgactaccagtagcaatgattaaatttttaaaactgtacgtttgtgcactctcttctttaatcacgcgtaagctatgttcgtccactaaaaaggctgaaccgtctaacacatcaatcttgtgttttttgaacaacattgaaatgccaccagttagtttttcaacaacctcatgttgtttccagtcttgcgttttcgcaaaatccaatgttgctccagtagtcgtcacaccaaagacagatgaatctttcgcctcttgtagtcgatgaccagctgaaatcaaagccttggaaggaatacagccgacgtttaaacaaacaccgccaattgtttcacgttcaatcagagttactttttgacccatttcggccgcgcgaattgccgcaacatagcccccaggacctgaaccgatgactactgtgtctaattcaattgcaaaatcacctacaaccattttaaaatcatccttccatcaataatagctctggatcagctaataattcttttaattcgttcatcgcacgttgcgcagttccaccatcaattaaacgatgatcaaatgatagtgataatttcaagactttgccaacagccaactcaccatcagcgttgacgattggttctgtcccaattcggccaacccctaagattgcaacttcagggtagttaacaaccggtgtaaaccaaccgccaccaattgatccgatattactgattgtcattgaaccaccactcatttcagctggtttcaatttgttatccaatgctttttgcgtattttcgccaatttctttagcgatggcaaaaatactcttgctgtcggcatccttgatatttgggacatagagcccgtgatcagtatccgttgcaattccgacattaatgtagtgtttataaacaatttcgttagttgcatcatcaattgacgcgttcaaagttgggaagtcacgtaagaccgttaccaaagctttaacgatgtatggtaagaaggttaacttaatgtccttcttagccgctacatccttgaatttcttacgatgggtcatcaatttagaaacttccacttcatcgaataaagtaacgtgtggtgccgtatgcttgcttgtcaccattgctttagcaattgctttccgcgttggtgacattttttcacgtgtttcccgttctggtgtcgcagaggtgtatggtgtcgcagcaactggttgtgcagctggtgttgctggcgacgttggttgttctgctgtctctacagcaggtgctgtcgttgttgcagcgccattttgcatgaagatttgcacgtcttctttagtaatccgaccatgtttaccggtggctggcacttgactgatatcaacatcgttttcacgtgcgaattgtcgaacagatggcatagctaaaatcgtccgattttggtcactaatcgcaactactgcttgactgcttggcgccgttgttttagctggtgttgattctgacgccgtagctggtgcttgttcagcagatgttgccgttgccgaattgtgacctggagcatcaatttcgaccaatacttgaccgacagtcgccacttcgccttcaccgactaaaattttaacgactttcccactaacaggtgatgggatttcttcaactgatttatcattttgaacttctaataaagtgtcatcttcttgaatggtatcgccttctgcgaccgcccatttttgaatttcaccttcggcaatcccttcaccaatatctggtaatttaaattggtaaacaccacctgcatcggttgcagtcggtgctgcttcgggtgtagcagctggtgttgccgtacttggtgtatcgttaccttcaacacctggtgcgtcaatttcaaccagtacttggccaactgttgccacttcaccctcaccgactaaaattttaacgactttcccactaacgggtgatgggatttcttcaactgatttatcattttgaacttcaagtaagacatcatcttcttgaatcgtgtcaccttctgcgactgcccatttttgaatttcgccttctgcgatcccttcaccaatatccggtaatttaaattgatatgccatacgtctaacgtcccttctttcgttatcgactaaaagttaataacttctttaaccttattttcaatatcagttgcatttggtaaccaagttgcttcagcttgtccaaatgggaatggcgtatcaggagctgaaacacgtgcaattggagcttccaatgaaagaacagcacgttctgaaatttcagaagcaacttgtgccccaacgcctgcttgtttttgtgcttcttgaacaataacgacccgccctgttttttcgacagaggcgataattgttgcaacatctaatggtgcaattgttcgtaaatcaattacttcagctttaatattctctttagctaggttttcggccgctttaatcgcttctctcaccattgcaccgtaagtgatgattgaaacatctgtcccttcagtaaccacagctgctttatcaagcggcactgtataagattcatcaggtacttcttcgcggaacgaccggtataatttcatgtgttcaagatacaaaacaggatcgtttgaacgaatcgcagaaatcaataagcctttggcatcatatggattacttggcacaaccacgcgaatccctggaatttgcgtgatcattccttcaaagttatctgaatgtaattctggggtatgcacgccaccaccaaatggtgcacgaatcgtgattggcatgttgcgtgtgccacccatccgataacgtgtccgtgacatctggccagcaatcgaatccattgtttcgaaaacgaaaccaaagaattgaatttcaggtacagggcggaagccttctagtgctaaaccgattgataaaccaccaatcccagattcagctaacggtgtatcaaaaacgcggtcttcaccatgtttagcttgcaacccttcagttgctcggaaaaccccaccgttcttcccaacatcttccccgaaaatcaagacgttcttatcatctgcaagttctaaatccagcgcatttgtaattgcttgaatcatcgttttttgtgccatcttaattcgactcctttgcactgtactctgcgatttgttctttaatgttttgtggttggtcttcaaatgtaacattcaagaaatctgtgactttttgttttggcgcagcatccgcttcgttgatggctgctttaatgtctgttttaacttgttcgatcaattggtcttcttgatcttgtgaccaaagtcccttatcagttaagaaacgacgcattctaacgagtggatcacgtttcaaccaaatatcgtctgtttctttggtccgataacgagtcggatcatcccctgataatgtatgtggtccataacgataggttaatgtttcaattaagaccggtccgttgccagcagttgtaaattcacgcgcttctttcatcacttcataaactgctagtggatccatcccatcgacttgaatggcagaaatcccagctgcgacccctttttgagccaacgttacagcagctgtttgtttttcacgtgggaccgaaatcgcaaagccgttattttgaacaacgaaaatggctggtgctttaaaagcacccgcaaagttcaagccttcatagaaatccccctgtgaagtcccaccgtcaccggtataaacgtaaacagcattttctgattggcgcttcttcatcccaaccgcaacacccattgcttgaatgtattgcgcgccgataatgatttgtggtggcatcgccttcaaagattctggatacttgttaccgtcaatatggcctcgtgaccataggaatgcttgtgataaaggtagcccatgttgcactaattgtggcacatcccggtaaccagggaataaaaagtcgtctttagtcatcgcaaagttacttgctaattggctggcttcttgcccagcagttggtgcataaaatcctaaccggccttgacggttcaaagcagttgctcgttgatcaagcacacgcgaccaaaccatttgtttcatcagttcaaccaattggtcatcactgagatccggcatcaattccggattaacaacctggccagtctcatctaaaatttgaacggtcttaaaatcttggctctcatcgctcaataacttctcaaaattaactgcagctttattattgaccatagtatccatatctcctctttaaaaaactgttttaatgactgcttatatctgtattacttaagcatctttacaagactaatttagcatttcacatcactaaatgcaagcgttttataagctatattagtcagtttacgctttcattagtttttattatatgtgaatctaatcactagttagctaattttcacgtctgttctatatctgttataatttaatttcgttttctgttatataatagcaaataataggcacaaaaaaagagtccgccgtagcagactcatcgttaaatttaagttggggtagttctatgccaagaccggttggggtatctcagcgttgccagcatgcactaagagctcttgaaacactctgactactggtttaatttgttgactgacttgcacgcaccgttcacttacccgcaaatcatttaaatcaatcgcaaccttaatttgaccaaggttgactaacttaatcattgttagcaggattgccccgacaaccaacgttgccaagcccatgaaagcgaattgattaaccattaatactgcacaaaacgaaaccaatgcagctaccgccatcataaaagtgcttcccactctaactttaggtgtttgtgctttagcaccaaccgttgcatctagcacaacgccgtgcaccatttcagtcactgcttcgcccgcttcaataacgttaacatctttgttaactgttgcgattgtaacgggtgtcttttcgctagcagccaataccaaaatatcaccgggcacaatttgatctgcaccgattaagcgtaaaaagccatcacgcataacgctaacccgtgcttgtgaattttctaatactgtttctcttttagcagcttcgacagttgttaagccacttggtcgagttgccaataaacgcattaacatcccactgcttgtaatgccagtgatgttaacgtctttttttaatttcttgtgcatcgcgttcgacactccttcccttttgaggaagtcgtcgtaaaccgctagcctaatgctggcagtaaaatgacagaccacctcgaatgatcaccatcgctactacttacaggtccttcagctgttttcatcattttactcaccagactttctctactttaaatttagtcataccgctttatccgacaaaaaaagacgcacaacaattgagcgtcatccatttatcatggcgttcccaatcgttcagttttagcactatatgacgtagaaaccatgttcagctacgttagaaaaagccttcattggcagtttcagttgactcaattggcatctctcgatgtttctgagtagcagcgtttgttcatataggagcctcacctaacggaaaagcaatatatctatactcttatactacccgtttcactttagcaggtcaagcaattcattccgttttaacttgaattgtgctagaataatgaatgacgaattaatcggaggtcttaactgtgatattaatgaaagatattatccgcgagggtaacccaacacttagaaagatagctgaacctgttacttttccgctatcagatgaagatcggcaacttgctgctgacatgatggcatttttagaaaatagccaagatcctgaacttgctgaaaagtaccacttgcgcgctggcgtcggtttagctgcaccccaagtagatgtttcaaaacaaatgtctgctgtcttggtccctggaccagacgaacccatcttcaaagatgtgattatcaatcctaaaattatcagccactctgttcaaaacgcagcacttgctgaaggtgaaggttgcttatcagttgaccgcgaagtgcccggctttgtgccccgccctgaccgtattacactacgttaccaagatttagatggtgaaagccacaagattcgcttaaaaaactacccagctattgtgtgccaacacgaaatcgatcatctaaatggcatcttgttcttcgatcacatcaacaaacaagacccattcgcagcaccagatgacatgattattattgaatagaagtgcgattggttgcgcttagcaactgagcattaatacagaattggcagttatcccgaattgtgggataactgccaattttagattaaacgggagttgttgcacccaagagcacgttaaagaagaagaagtgctaattcgagttggtcaggctttgaggcttaacggtaaagactactcaagaagcacataaaaaaaagcgtgattgaaatcttctaatgagatttcaatcacgctttttttatgcttccgccgcttcaggcgtatcggcaaattgactgttatataaattagcgtacacaccaccggccgctaatagcgaatcgtgcgtcccttgttcaacaatttgaccatggtccatcactaaaatcaaatccgcgtcgcgaatcgttgagagtcgatgggcaatgacgaaactcgttcgcccttgcatgactttttccatggctttttgcaataaaccttccaatcgggtatccaccgaactagttgcttcgtccaagattaaaatcttaggatccgcaatcacggctcgggcaatcgtcaatagttgtttttgcccaagcgaaacgttgcttgcttcttcatcaatcgtcatttgatagccgtttggcagcgtatggataaaatgatcgacattagcggttttagccgcatcaacgacttcatactctgtcgcatcgagtttcccgaaacggatattatcggtgattgaagcatgatataaccaagcatcttgaagtaccatcccaaattgggaacggacttgttgcttgcttaattgcttcgtgtcaaccccatcaatccgaatcgttccagatgtcacatcataaaaacgcatcaacaggttaatcatcgttgtcttcccagcaccggttggcccgacaatcgccactttatcacttgggttagcagtaaagctcaaatggcgaatcaatggtttgtctgggttatagctgaaactgacatcatcaaattcaactttaccttgaacgattgctggcaacgatgctgtttcattatcggttgcttcaactggctcatctaagatttcaaatacacgaccagttgcagcagcagctgattgaatcacaccagacaactgtgtaatctgtgagattggttggttcacttgccaaatatattgaatgaaggcttgtaaattaccaactgaaatcacaccgtgcaagacataataaccacctaacgttgccatcccggcatacgtcatgtttgtcgttaaaccaactaacggcatcatcaagccagaaacaaaggctgccttaaagccatagtcagttaaccgatccgtaatttctgcaaaagcagcaattgcgcgttcttcttgtccgtaaagtttcaagacactgaagccgccataattttcctgtacaaagccgttcatttcgcccaacgtgtcttgttggcctctaaagtacggctgcgatttctgaatgacccgtcttgaaatcaataacgatgctggaatcattattaatgataagagcgccatccaaatattaatcgtaatcatcatgatcacggccgtgatgatccctaagatcgatgtcacaacttgaattaaactctgttgtaaagcgttcgtaatcgcgtccacatcgttggttacccgtgacaagatattcccttgttgttgtgaatcaaaaaaacgaacgggtagcgcattgatttgcaaatcaatgtcgcgccgtaaatcacgcatcgcccgttgaacagcccgcgtcatccaaaacgagcctaaaaacatcgtcacttgatatagcaacgcaaagctcaaaatcatcgcaatcaccttcgcgatataactaaaattaatcgcaacgtgttgtgctaaactccgactgatttcagtaatggctagtcccatgatcactggccacagtgcattagcgagcaccgaaataacagttgcggtaatcgcaagccaaaatgtcacttgatacggcccaatgtagcgcattagccgtttaagttctctaatattcttcattgagttcctcctgtgataactgtgatgccgcaatcgcacgataaatctcgttatcttttaataagtcgcggtgagtcccaataccaaccacttgaccttcgtttaagacgacaatccgatcagcattcatgatagtcccaactcgttgtgccacaatcagcactgttgcctctttggtgattgacttcaatgcacctcgtaacgccgcatccgttttataatccaatgctgaaaaactatcatcaaagatataaagcgcggggcggcggacaatcgctctggcaatcgccaaacgttgcttttgaccaccagataaattgctcccaccttcggctaaataagtttgtaagccgtctggtttttcagcgacaaaggtatctgattgtgcaattttcaaagctgtccataattcttcatcagtcgcattcggattaccataacgcaagttttccgcgattgttccggtaaataacaccgctttttgtggaataaaaccgatcttttggcgcaacgccttaagttgatagtcgcgcacatcatgaccgtcaagcttaatcgatccacgtgttacgtcaaaaaagcgtggaatcaattgaatcaacgttgacttaccactcccggtactcccaataaaggcaaccgtttcacccggatgcgcttggaacgtgacatcccgaacgactggactttcagtcggacctggataagcaaaggagacattatcaaacaccaattcaccttgtgtgtcggttgttgttaccccgtcttctttttcggtaatattaattggcgcattcagaattttttcaattcgttctgctgaaacagcggcccgtggatacatcatgaagacactggcaaataacataaatgaaaacagtacgtggaaaatatattcaataaacgcaatcaacgtcccaaccgctaagtgaccaccatcaatctgaacagccccttgccaaatgattagaacgaatacgatattaaagatgaacgaaaagcccggttgtgctaaagccaccaacgtaaacagccggatagaactatgactgtagtcatcattcacttttctaaagcgtaatttctggaattgttcccgcacaaaagcacggacaacacgaatcccagtcaagttctcacgcagattcagattaatcgcatccagatttttttgttgttccgtcgacatcggttcagaaacgcgaccaatcaagacaacccccgttagcaggattggaattgccgcaaatacaatccatgagagcgattgacttgtccgtacaatcatgaaagcactcgcgacgatcatcatcggggtcataaaccctgtccgcaacacttgggtcataaattgcatcacctggaaagcatcattagtggtccgagtaatcaaagaagacacaccaaattcgccatactcactatgggaaaactgcatggtttgtttaaaaatatcgttacgaatgtcacggacgatattggtggttaatttgctaccagtataagccaagccaattaagccaattagtccgattaaacagattccaaccatcaataacccaaattgccacacaggaccaaaggtatgttgattaattcctttatcaataatttgtcctaataacgttggtaatcccaattcgattagaataaatccaaatacgcaaataaagttccaaaatagtaatttcttatatcggatcgtatagcgccacattaatttcatcggtgcaaactccttctagacttcaaatttaatcttctacctgtgccatatctttaacatactcgattgtttcgcgattgacaataaaagcaacgtcaaaatgcaattgttcttccaaaaaccacacatcagtgactagcaaagccggataacgcggactgacggaggcaatccgccgttcgtaagccacttcattgagttgttcctcaattgcggctgccacatcctttagtgcagatgatgtttgtcggatgggcacttggtattcgaagaccatcacattattgccccaaatttcagtgggcaggttcgaaaccagtttggcttgcggtgcataaaaatccggctgactcgcttgcattttttgataagccaccgttgcaatttcatccgcaatttcttgactactgtgttgtaaaatccgcgtcgctctttgtcggcgtaaccgtttaatcaaccaggttaaaaaaagcgctaacgcgacaatgataacgactgacaaccaaattaacataacaatcccccacttctattgctcactaatatgataattataaccgaatcgaggcaaacacgctatttagagcacgtcgctcaatgtatactttaccgaaaagatatgctaaaatattcttaaatgttgagtaatcaacccctggacggttaatctttcgtttaaaactatgatgaataataaaggagttttacaattgatttataaagtacttttccaagcagacaaaacccaaagccctctacgcgaggcaactaaatcgatctatttagaagcagacagtgccgttgaagcacgccaacttgttgaagacaatactccctacaatattgaatttgtacaagaattatctggtaagcaccttgcttttgaacaagaatcagaagattttaaattaacggagttttaattaaatgaaactcgatattaagaataacgaaaccgccgttttcgccgtagggggacttggtgaaatcggtaaaaatatgtatggtgttcaattccaagacgaaattattgtgattgatgccggcattaaattccccgaagatgaactcttagggatcgattatgttatttcagactatcaataccttcaaaagaaccaacaaaagatcaaagccctcgtcattacccatgggcatgaagatcacattggtggtttaccttacttcttgcaacaagtccctaatgtacccgtctacgctggtccattggcacttgccttgattcgcggtaagttagaagaacacggccttttgcggtcaacagaattacacgaactaaacgaagataccgtccttaaattccgcaaaacaagtgttgatttcttccggactacccattcaattcctgatactttaggggttgcgattcatacacctcaaggggtaatcgttgaaactggggatttcaagtttgacttgaccccggttggtaatcaaccttcccctaatcttcaaaaaatggcacgtttaggtgaagaaggcgttttatgtttaatgtctgatagtaccaatgccgaagtaccaaactttacaaagtcagaacgtttcgtcggcacttcaatccgccatattgtggaacgcattgaaggtcgcattattttcgcaacgtttgcttctaatatttcacgggtctcacaagccactgatgctgcgattgctaacggtcgtaaaattgccgtctttggtcgcagtatggaagcagcggttgtcaacggtcgtgaactcggttatttaaatattcccgatgaagctttagttgatgccaatgaattaaattcgttgcccgccgacaaagtgatgattctatgtacaggatctcaaggtgaaccaatggctgctctaagccggatcgccaatgggactcaccgtcaaatttcaattcaacctggcgacaccgttgttttctcaagtaatccaattcctgggaatacaatgagcgttaaccacgtgattaataagctttcagaagctggtgctgaagttattcacggtaaagtgaataacattcatacgtcaggtcacggtggtcaagaagaacaaaaattaatgctccggttaatcaaaccgaagtacttcatgccttgccatggtgaataccggatgcaaaaaatccatacggaactcgctcaacaatgtggtgtggaacctgataactgcttcatccttgaaaacggtgacgtcttagcactcacttctgactcagcacgggttgctggtcactttagcgccgaagacgtttacgttgatggcaacggaattggcgatattggcaatgtcgtgctccgcgatcgtaaaatgctctcagaagaaggtttggttgttgttgtggcaactatcaatcttggtgaaaagaacattctcgctggtccagatatcctctcccgtggtttcgtctacatgcgtgaatcaggtgaattgattagcgaagcccaacgccgagttttccgaatgatcgtcaatacgtttaacgctaacgacaaggtcactgaaaaccaagtccgcgaagcaatcattgatggcttacaagacttcttgtttgaaaaaacagaacgccgcccaatgattttaccaatgatcattcaaagtacagaataataagttttgcgccaggtcaatatatgacctggcgctttttttattgtttaatgcaagtttttattgtcaacatttggtaaaaaccgctataatatacaacagattactttttctgaaaggcggcttgttcatgccctccaatccccgtttttacatcattttaaaccaagttgccggtaccggtcaggcagcgagtatctggcctaaaattgaaactcaattaaaacaaaaacaaattcactatgacctgcaactctcccactacgcaggtcacacgacccaattggccttccaatttgcaaagtttaagtacacggatcaaattttattaattattggtggagacggcacgctcaatcaagccattaatggtctccagaatgctcagcgcggcgatattccgattgcttacattccttgtggatcgggtaatgacttcgcccgtggtgtcgggattagtcgtgatccattgaccgcactcgaacaaatcttgtcggccacaatgccaactgccatcgatttaggttattatcatgacacaacgaagaacgaccatggctacttcgttaacaatgtggggattggttttgatgccaacgtggtcagcaccaccaatcattcaaatcataaacgacttttaaatcgattgcacttaggctcattagcttacatcagctcattggttaaagtttttatgcaccaagatgcgtttgaagtcaccgtcacggctgatcaccaaaatcattattttaaacgtggctttttagtgaccaccactaaccatccctactttggcggaggggtccccatcatgcctagcgcaacggtcgacaaccatcaacttgatttaattgtgattgaaaaattgaatccctttttcttttgctatctttttgtgatgatgttgtttggtcggcacacacgctatcaagcggtgcatcactttgaaggaaccaacttagcgattcaaacaaaaacattagaattcgggcaaatggacggtgaagaacttggtagccggacatttgatattcactacagtcttaaaagccaggcattttggctaaagaagcaagcataaataaaaggcgctgcctccaagttgggggcagcgccttttaacgcgctcttcaaatcatgttcctgtgcctagcaacacaagtcaaccgattgctttcagcaatcattcgcattgttaggctagtgctcaaaagttgaccaaacttgattgcactcatttctttagaagtaatccgagaagtatggttggtccattggaataatattctcgagattttttagtgcttgtcggttggcttggagtctttcaatctttgccaagtatgatgggcgtcgatagctcatcagcattgttgttagtgtctggatgtcgcattgaattcgttcaccgactgggcgacttgtgacctgcacttttccttgttcatcccaataaacgccaaacgtaccgttattccattcagctaatggatcggtcaattcaatgtggaatgcttgcccgtccgtttcaaacggataagccaacaagaattcacgcacatcaacaatccgcgccataaaatatggcttaatcgtctggtcaatatcaccatcttctaataagaatgaaatcggttcatcctgatattgattacccttgacatgttcaatcattgaataatgcgcgccaatgaagttccacagaccaatccgggcttcttgattaagataaatcatttctttaatatggaagacttcgttggcaatccagtataaaacatagccggtgggttgttcattttcatcataataaacaccagcaatccgttcttcttcattttcccaacgccaatattcatcccagttcagttcgttacgaatcattgcaccgtgattttttagtgcaaaccgttgatacgttttaatcacgtcttcatcgtcaatatcaaggcgttcaacgtgcccatttaccggccgttgcttaggtaattggctatcacgaatatcataagttaggtgatcagacatgatctcccaccctttcttacgataaaacggaatgctgtatggatataaatacgatatccactgcttattctcacgcatcttgttcaagccgactttaaccaagtcatgcatcaaaccatgaccggcatattccgggtaagtcccgacaccagtcaaaccacccatgttaaatacctggccatgaatgttcacgcggcaatgatagatggctaattgtgaaatcagttcgtccccattaaaccatccgattacgtcagatttttctaatacgggacgtttggcgcgttctaattcgccctcttcgtagccactatcagaaacttcctgatcggtgacttgaaaaacataccgtaataagtcattaaattgttctaaatgttcaattgtcacgggtctaatctctaaattagatcgctggtcaaccattgtttcgcctcatttttcgttagttgtttaccctattatacactattttgatttcggcataaaatcgtacggtgtcaccccggtcatcccaatcattggatccacttgctgttgcgttagaacagtcggtgttaagacataactgattggcgtttcttgtattgcgtcgtcgtcttctggcactaagttcagttgttcatcaacagccgtttctggcgcacttggtggtgccggctggtcaacaattgttttggcttctgtctgccccacactggccgtcttaatggcggtgctgagttgttcaccgttaaagacactttgaatccgttcttttaacgtcgtttgccgattggccgaaagttcctgagctgctttttggaaagcactcggttcaccaatcagaatcaacaatgatttagcccgcgtgactgctgtgtacagtaagtttcgcttgagcattcgttggtattgattgaccaatggtagaatcaccatttcaaattcagaaccttgcgccttatgaatcgacgtacagtaagccaatgtaatcttgtgccactcactccgcttataggtcacttctgcactatcaaaagcaatggtgatctcgtcaaccttgtccgcactctttttagcataggtaatccccgtaatctgcccgatttcaccattaaacacattttgttccggactattgaccagatggagtactttatcgccaatgcggtagtgaacgttaccaatgctaacttgttttttgcggtcatctagctttggattcatgatattttgaatcatcgggtttaactgatcaattccggctgctcctttgtacatcggcgctagcacttgaatgtccttagtttcaaaaccacgcgctttggccttagtaacgacttgttcaatcaccgattcaatttgatacggattacattgaatgaaactgcggtctttttgcggcttcaacaaatccgctggcagttggccttgattaatttcatgcgccaacggaataatcgttgactggtcatcttgccgataaatacgttgtaattcaaccgctggaataaccttactctgcaataaatcaaagaaaacttgccctgccccgacggatggtaattgatccttatccccaaccaatacaacctgcatatgactgggcaccgcccgtagtaatgagcgaaacaagtaagtatcgaccatcgacatttcatcaataatcaataggccgccttccaattctttgttaccggaaacatctggattattttcgcggccagtgattccgagtaagcgatgaattgtactagcaggcaaacccgttgtttcactcattcgttttgcggcccgacctgttggagcggccaataaaatcggaaacggcgtgtctttgtactcattaatatctaatgacagcccgtttaattcagcgtataatgtcacgattccgttaataatcgtcgttttcccagtaccaggtcctccggttaataagaacgcccggtgagtcatcgcaagcttaatcgcctcttgttgtacgtcatcgtatgtcatcttaaaccgtttttcgaggtggcgaatttcttgatctagatcatgtttaggatagctaagttgatcgcgttcattttcaattcgcattaaatggttcgcaatttgccactccgcattaaataacccattcggataaatccgattctcatcaccaacgactttcccatcatgtgcaagtgccatcagttgttcagccaccaagttcggatcaatagcaacattgcgtgctttttccatcaactcaatactagctgccaataacggctgggcctgggtataggtatccccagcttgattggtcaactcatttaacgcttgcattaaagccccttgcacccgcacggctgaatcagcggcaaacccgagggtctccgctaaattatctgcacgtttaaagccaatcccagcaatgtcagccacgagttggtacggattttcttggataatcttcagcgtatcttcatggtaggtctgatagatgttataggccatcgagctcccgaaaccatagttgtttaagccaataataatctgttccatcccattattaatcgtcagcgtttcaacgagttgtgcttgtttcttcgcatttagccccaatggttctaacgccgtcggatcctctaatattttatcaatcgcgtcaattccaagagtatccacgattttttcggccgttttctgcccaatgcctgtgaatttttcgccagacaaataagcgactaagccggccttagtcgttggttgatccacttggtaattatcggcttgaaactgtttgccatatttaggatgagtgaccactttgccatagaaggtatatcgttcatcttctttaatatcgccaaaactcccggtcaccacaatttctgtttcgtgccagtcaattgtcttatgtgctactttaacgagtagaattttaaaaaaattatccggactctcatagaaaatactctggacggttccggtgactgttggtttggtttcgtctgtctttgttatatccacaatcgccatcccttattctttttgctttttagcctgcatgaaaccttcaatatcaattaactgttgtttgttctttttaaaataatccggtgcatagtgcttggcttgttcgaaataaggctcactatcagcgcctaagaccagttgcgtcaagccatacttaaataatacttcaccattttgaggtgcaatggtcaatgcctttttaaggtaggtctgtgcttgatcaaaatcacccaagctcgttaaaatatcgcccactaaaagattggcgtctagttggtctggttcttgctcttgaacggtcaacgcaaacgccaatgcccgtggattctgttcgagttgatgatatgtctgcgcaagcatatactgcgcatctgttgattgtgagtcttgcaccaactgcatgaacaagggtaccgcttgttgataagcttccgcttgataatagagtgttcctaatgcgtaagtcaatgcagcttcattaggaaattgcgtcaacgctttttgcaaaagtgcttcagcttgttcaaaatctttaagcgtcgttaaaaatgtcgcaagggtaacgtaagcttcaatgtcttctgagtgatcttgtaaatattgtacgagatctttaacagcggcttcgtggtcgccagcggcccattttgctagaattgcttgcacgtgatcatctcctatatcgtatctgttgcggataattgctttctgaggaagtgtgtatcattccacttaattagtttgaaagatgctccttgatcgtcagttgtcatcgtggtcacagatgaatttgtcacaccgccgtctttgcggacctgagccaatggtgtcttgagtaaggactgcatcatcgccaccatcgctgccccatggctgacaataataatatgatcagtcggtttagcagccttcacaatcgcgtcaattgcttgcgttgtccgttcaatcacttgttcaaaggtttcccctttaatttcagttggatcatactccgctggtgcttcacgaaaggccttcacgattgtcggatattgtttttcgacttccgtaaagcgcatcccttccattagaccgagattaaattcgtggagtgcatcaacaaccgtaatcggaaaatcctgccctaagtctcgttttagcgccgcagacgttacctgtgtgcgttttaacggactcgtatataaatgatcaaaatgaatgggctttaaaaatgtggctaattcttcaatttcaacgtaactactgtctaataatggtgaatcaccacgtgcaccttgatagcggccttccaaattccattcagtcttaccgtggcggataaaatataaggttgtcatgcgttctctccttaaaataacttacttttcattatgaaagagttacgccctaaattcaagtcaatcgactaataaagcaagcatttttcctgtaaaacgccatcaaaaaaaccgctaggataaaaatactttttatcctagcggtttcatctattagttgctctaaacgtgtttcagtaggcatatttctgcggttaaccctatttgccaaatccagttaatcctcaaaatatgaacgcttacttacacactcttttatttactttctgcgacagcttgcattgcaattgcgttgacgtagttgactggttgatcgtagtttggttggaagaacatgtcaaccattgctaattgatcaatcgtcatcttcgtttgaatggccattgaaatgacgttcgctgcttgagcaatatcatacatacttgtgaatgaaccacccaatacttgacgcgtcttaggatcccacattaagttcatcaaaaccggtgtcgttgatggcatgaaatcagggcggtaatcttgttctaacgttgttgtagcgacttcaatcccacgcactttcgcgccttcaactgttaggccactccctgaataggtgcgaccaaataattcaacggcagaagttgcttgcgtgcccatgtacttttcagttggtgtttcgatgttgcggccgattaaaaggccttggcgaacagcgttggttgccaatggaatgtaatctgctttttgtgttggattgtaatgaacagctgctgaatcgccggctgcataaacatccttaacagacgtttgcatgtattcatccgtcaaaatcgcaccgttacctaacatatcaacttgccctttgaaaaggccagtatttgggcggaagccaacacataaaattgcaatgtcggctgtgtattcgttcttatcagttttaacagtgacttgatccgtccctgagaaactgaccactttttcgctaagcgcgagggttacaccgtggtcacggtaatcttgttccacgatttctgagatattaggatcgaaattcttgccgagtgcgtgtggtaatgcatcgattaatgtcacttgcttatcagttgttgcataggcttctgccaattcggcaccgatgtaacctgaaccaatcacgataacactcttcacatctggggcgctcttcttcaattcattggcatgcgcccagtttttgcagagcttaacgttcggattgtcaatgccttcaattggtggaatcacaggtgatgagcctgttgtgacgatgattttatcaaatttttcggttgtttcttcttccgttactaggttcttaacgcgtaatattttttgatctaagtcagcttctaaaacagtgtgttgcatcttcatgtgagcgcccgcttgcgctaacatttctggatttgaatagaacattttctgaggatcggctacatggccgcccacccaaagggcaatcccgcatgataagaatgataaattatcgtgtgtttcataaaccgttacatcccaatcaggatgttctgccaatgttgcttgtgttgcaaatgtccctgcgtgtgtacaaccaataactgctactttcatcatgttacctcctagaaatatccaaaaaacgacggttaatcgttgagaatttgtgaaatattacgcaaccagcatgtaactatattgtacgctacttagtttcgaaaagtcaattgcctccagctattaaattaatttcacaatctaaaacgaataaccacttatgttttaaacgttatattgtgattttattctaaaaaaggtcgttgaccacttattgaacaaacccacaaaaaaagtgctgataaatataaattcatcagcacttttaacgattaaattagatatattgtaatactttcatgtcagcatcatcgttcgcagccttataagccacgtcaatcgtgccgccacctaaacattctgcgccgtcataaaagacaaccgcttgaccaggagtaatcgcacgcactggatcatcaaagacaaccgttgcagttgtgtcagatgtcatgtggacggttacgccgacgtcttgttgacggtaacggaacttagccgtcacgtggaaatctgtcccatgatcaactggtgtgatccaagaaatattacttgcatctaattgatcagcatagagtaattcattatggtagccttgaccaacatataaaatgtttttgtctaaatctttaccaacaacgaaccatggatcattggattcgccaccgccaccgattccaagaccggagcgttgaccaatcgtgtagtacattagaccgtcatgggtgcctttttcaagaccgtcgaccgtcatcatcttaccgggttgtgctggtaagtattcgcctaagaattgcttgaagttccgttcaccgatgaaacaaatcccggttgagtccttcttcttagcagttgctaagccagcctcttcagctaaccgacgcacttctgctttttgcatgtgaccgattgggaacattgatttttgtaattgatcttgagaaagagcgctcaagaaataagtttgatctttattgctatcaccgccacgcaacatgtgcgcgatgccgttatcatcgcgttcaatctgagcatagtggcccattgcgatgaagtcagcgtctaattccattgcgtaatctaagaaagccttgaatttcacttctttgttacacatgacgtctggattaggcgttctgccgtgtttgtattcgtctaagaaatattcgaacacgcggtcccaatattctttttcgaagttgacggaataataaggaatgccaattttagaagcaaccttggcaacatcctcataatcttccgttgcggtacagacaccattttcatctgtatcgtcccaatttttcatgaaaacaccaatcacatcgtatccttgttgctttaacaacaatgctgtgacagatgaatccaccccgccgctcataccaacgacgactcgtgtattactgtggtcaaccacaatatcaccatcatttcaaatagattctagttttctacgatttgaaggtcgtgaattccagtacttaacattatagcaatcttggttaatatttcaaactaaaacactcacttttcataagttaaacgtaaaaaaagcagtttacctatcaaactcctggtaaaccgctcttaaaacgttatttagccttctttaattaacacttcacgtgccactaagttagcaataataaaattaaattgttcgacgttttcagcattcttttcactcttgaaaatatcgactggatgtaagccatctggagaggtgacagacatcttcaacgtctgtaactctttaccaattgtcatcttcaacttaatcgcactgttaaatggtgaattaggatctaatggccgttccatctggaagttaccattgtttgtgggcacaaagccaacatctcttaatgtgtattttttaacggcgggattgagtcgatattgcaccgtactccccaaaaccgttgctgttgtttttaataaagccatctgcctaacctccatacactgaataagtctattttagcacaagcacgtaaacgctgcctaccccttagcggcttgctttgctaaattgcgtttcacaatcttcgtgagcgcttcggcaaaagcagcgacgtcttcgctcgatgtttcgtgaccaaaactaatccggatgctttcggcaacgcgcgggctatcctcaccatacatcgcgatcaacacgtgtgagggttccaaatcgccagcagtacatgccgaaccacctgaaattgcaaagcctgctaaatcaagattcatctgcaagacataggttgaaacacctttaatccagaggttcacaacatgcccgacttgatcagctccttctgcgttcagcgcaaaatcaatgtcgttggcttttaaatcagctagtaattgctgtttgaatccagcataccgtgcttgtaggtctgctttaaccgctggggccaataattcaactgctttcgcaaaaccagctacagcgggcacattttcagtccctgcgcggcgcttcttttcttgttcaccacctaggacaaatgatggtaaatgaatcgcgtcgttgacatagagaaagccgatttgcttaggtccattgatcttgtgggctgaaactgccagtaaatcgatattgtcagcttgcacatcgatatctaataagccatacgtttgcgtagcatctgtgtggaaccaggcgtttgagtcgcggacaagttcaccaatttcgtgaattggcatatgactgccgacttcgttattgcccatcataatcgatactagaatcgtttcgggcgttaaagccgccttcaaatctgcgagatcaatcaccccttgttcgttgacgggtaagtaaatcacatcaaacccttgcgtttctaaataggccatcggttttaaaacggaatgatgttcaattgccgttgtaataatccgcttgccttctttagcacgcagtttggctgtctgaaggattgccgtgttattactttcggttgccccactcgttaagataagctcgttatctttcgcatgaatgctctgtgccaaagtatggcggctggtatccaacaccgtgtgggcttggcgcccaaaataatgggtgctcgatgcattcccgaaatcggcctgcatctgttcggtcatcgtcgcaatgacctctggggccatgggtgtcgttgccgcgttatctaaataaatatgtttcacaatttttcgcctcattttaaaaagtatctataatagtttaacataattcgcttttaaagcacggataaacacttttcgctaccaaaaaaggctgggacaaagataccttgtcccagcctttaaaacacttaatctcagattaagcagtcattaaagctgctttttgatctgctgttaatgattcattcatccggccactcttgaaaccagctaaatcaaccgttacaaattcaaaaccagcttgttgtaatgcttggttgatttgttcgctgtgggttaagaagtcagcaatttgtgcttctgggacttcaacccgggcgattgattcgtggtaacgaacacgaaccgttgcaaaacctaaatcacgcaagaatttttcagattgcatcacttgagcaattttggcttcagttaaggctgtgttatatggaaagcgtgaagaaactgaacagctcgctactttattccagttatttaagtttaatgtctttgctaattgacggacatcaatcttataaaaaccagctgtttgaaggacactttctgcgccagcttcgtcacgggcccgtaaacctggacggaagtcgctgttatcatccatgatcatcccatctaaaacgtggtcaaagcctttttcagcagcaatttggttcaattgtgtatagaacatcttcttgctgtaataccatgtttctggtgtgttgttggcaatgtgttcgtcagataagtagttcaatgttgttgtttcgacattcgcgcccatatcatgtgccaagtcgatggctttgttaaattcttcgtctgtgaataattctgagttagcaacgactgctaagacgttttctttgccgagtgtttctaaagccatttttaaaactaatgtgctatcaatcccaccagaaaaggcaacaatcactttttccatttgttgtaaactgacagttaacattgcttttttttcagataatgtattcattgttaaagacttctttctatatcattagattaattgttttaaagctgttaattcattttgaatccgatcggcatacaccaaatcgttgttatctaaactcttgacgatcatcaagtttaaatgcgcggcactatcaacaaagtttttgaaagttgattgactagcggtttgttgcgcgtcatcaaggctaccataaagttgttctgctgttaaaagcgcttgttgcgcttcaattaaactggttgagattgtccccggttgtgaggcatgagcagcgacttcgaataagtcgaccatcatgttttgcgtttgtttaatttgttcacgcatggttgattcctccgattaaattagatgccaaagaaactccgcataaagagtgcggcacatagaccaccaacaaatggtgcaattccgggcacgataatcccgtattgccaatctgagttggctttatttttaattggtaaaagcgcgtgagcaattctaggacccatatcacgcgcaaggttcattgcgaatccggtaggaccgcccatccccatcccaattgcccaaacaagtaacccaactgcgattggtgcaatcccaggtgtcttgatttgtgtaatggcgataattgatgaaatgaaaacaaatgttgcgaaaaattcaacgaagaagttccgtggtaaattccggataccaggtgctgttgagaagatgttacgaaccgcaacaggatcgacattgccttctgatgctttaaattcatcagcgtacatgatatagacgataactgcaccgacaaccccgcccaagacttcagcaactgagtaagggataaacattgcccatgaaacgttgcctaagatacattgtgctaacaccatggctgggttaattgaaacatctccgaagatgaataatgaaactgtaatcccaaacccccatgttgtaatggcaaataaatgacctgagccacgatactttgaacctttgaggacttcatcactgtgaaccccaaccccgaaaatgatcatgagcgctgtgcccatgaattctgctaataactgatgaatcatgaataaattcctccaaataataacgatttaatatctaaattttgatagctttaacgcgttacatcaggatagacccgactcgggcatactctgataaacagcaagataaacttgattaagtgccacgtcatgcgccttggcggcagctagacaatcgtcgaactctggactatatttttcgagatcgtcatagttcacgattttgacccgaatatcgccgaagcgcgtggctacagtgataaaatgacgtggcataatggtgcgccccatcgtctggtaacgcacaccaacagttgctgtgtgttttaagatcagataagtcatggcttgttgatcggctggatgaatcatgaccgttagcttaattgcgggccgatttttcttcatttgaattggactgaaaaaggcatcgagcgccccattgtccatcaataaatccaaaaccggcgctaaactttctgctgactggtcatcaatgttggcctccaacactaaaatctgatcggtatcggttttaacaacctgttggcttagttttttttttcgcacaacatcacgcgtaatgcattgagttgcggtgtttcccgattaccaaaaccatagccgactttaatgatcgtttgatcgtctgggattggacagaattggtcgacaatcgttttgacaatccccatcccagttggcgtgatcaattcggtctgcaagtctgggttttgtttaattggaatcgcactaccgacgcgcatttgcatcacagcggggactggtacgggcatcatgccatgcgcgactttgataaagccactcccatccgttaattcggatgaatagacttgattaactgccaataattcgagggcgacaaacgctccaacaatatcgacgattgaatcaagcgccccaacttcatgaaaatgaacatcacttaatggtaggtcatgaacgaccgcttctgattgcgcaatttctgtaaaaacttgtttggcgttcgttttaacataatcgcttaaatcactgtgatcgatgatggcttcaatgtcttttaaatgtcggacgtcatcaccatggctgtgcgtgtgtccatttgcgtgttgatgcgtgtgtgcatggccagttgcgtgtgtatgcggatgttgatgctgtgccggtgttgtttcaataaaaccttcatccttgtgcatggcttctggcaaatggacgtcaaaatcggtgccataaatactacttttagcaatccgttctgcatgtaggtggtagccagggacattcaacttagctaattctgtttcaaactgtttgaaatcagcccctaaatcgagcaaagcgccgatgaacatgtccccactaattcctgaaaatgcgtctaaataaagagttctcatttgtcatcctccgtgtcacttaaatgattgatcatacttgctgagtagcccgcaccaaagccgttatcgacattgacgacggtaatcccggacgcacaactattgagcatggtcatcagcgctgttagtccgccaaagttagtgccatagccaatactggttggcacggcaatcaaaggtttttcgatcaacccaccaaccacactggctaaggccccttccataccggcgaccacgatgacaacttgggcttggcgaatttcatccaaatgttcaaacaagcgatgaatgcccgccacaccaacatcatagattcgtttaacttgattaccgtatacttctgcagtgaccgccgcttcttcggccactgccatgtcggaagtccccgctgtgacaacggcgatatagtgatccgtggttggtagtgggtcaaccatcagcactacacattgcgccatttcatagtacattgctgtcggttccgcttcttgaatcgcagcgtacttttctggggaaactcgcgtacataaaatattttcggcatgtcgttttaacgaactaatgatgccaatgatttggtccgccgttttaccggcgccataaatcacttccggatagccattgcgcttttgccgacttaaatcaaccttggcaaagcctaaatcatcaatggtctgcgcatgtgccagttgctttgttgcttctgtcacactgactttttggtttgcaacagcttctaaaagctgttgtagctcatttgttgtgtccaaactactcattctttctattgttatttcacaataacccctaaaccatcagggatcactgtcactttggcatctgccccttcaatctcgtaggcccgttctaacgctgcatctaaactggttgccaattccatatgcatgtctgtaattaattgtggatcaaccaaatctgacacgaaaatcacatgatgttggaccagaatccgagccaagatttgtgatgtccattgatcagggaccgtttcaagccgtggtgtattgattgcttggtctaagaattctttaggatccttaacgtcagcaatattgtgatagaacccatcaccaccatgcccgtcacgtgcaccagcgaccatgataatcacgccaccttgtttgttcgtcgcttcagcagcagtcatccctttaacggcttggtaaatattttgatcaagtggatagccaccatttgttgaaatggcgatatcacaatcgatcttgtcgacttctgataaactttcaacgaagtcacagccttttttgtgcgctgtttctaaattaccggcgaatgaaccgatgatgtgcttgtcttcatctaaaacaacgttcaagatgaattcaagcccagcttgtttagcggcataaaccatatctttgtggactgggttatgcattaaattcccggttcttgaatagtgggaattgatgaattcacctgagtggttggccataattgttttgtatgaagccacacccggtaaaacagacttccgcccgcctgagaaaccagcgaagaaatgggattcaatgaagccttcagaaatcaataagtcagcttcaacagcgactttattgataatgcaatcgccacctgatggcaattgaccgattttcacaactgagctgtcatcggttgaaacatgcatgacgatttcttcatttgcaacgatttcttcaccatatttgttaaccaattcttcgtgcgttgatggtcgatggaacccagtcgcaactaaaatccgaatccgtgcatctggtgctacagaacgaatccgtcttagtaaaatcggcgtgatgatatgtgaaggaactggtcgtgtatgatcagaactgataatcacgatattctttttccctttagccaactcttctaacttagggctatcaatgggattgtccaatgatttttcaaccgtttcggcttcgctcattggattttgatacgtagcagcttgtgaaacaagcttcccggcaaaattcgcgtctgcaatattagccgtgataattttttgatcgtaaggtaatttaatggctaccaaactataggacttcccttctcaatgctgattgaatgcttttttaaagctacgtccatagttatacagattttctgaaaaggatgcggtataatttatgaacaacatttcattattacttttaggtgtaacaaatgataacaactttatagtcttcaagacgtataatttagattaaagttatttaatgattagcagatataataaatcagtacaaagggtaggcagatgtattatggttttaacagacattgaatttttaattaactttttagaggaacgtcacgtcccagtgattaccaaaaagaagcacacatacttgacgtaccacggtttggaagaacggtatacttatattctgaaaaaaggcgtgattaaaaactcgatcattttacaagacggtcgtgaattcaatctctcttacattacccagccggatgtcatttcacttttacgggatgaaatttcaaaatatacggatcaaccgtttaacgttcgcgttgaaacagaggaagcaactttctatcagattgaccgcgtgaccttctggaactacgtgaatgccacccccgagttacagaattacgttaaaaattactatcgtaaaaaattatccgagaatatttatcgcttgcaaaaaatggtaatgaatggtaaaaacggcgggctgtgtgccttcttatacagcttaattgatctctttggtaagaaacgccgcgatggcatcctgattgacttcgtcgttactaacgaagacattgccggcttctgcggaattagctcgcgcagtagtgtcaatcgcatgctcaaccaactcaaaaaagacggcgtgattgaaaccaccgagcataaattcttaatcaaagatgtcagttacttgcttgataatatcgccaattagcgatttgttaacatatgtaaacatgattcgtgattgaaaacggctatgagacgcgtagccttaatagtcgagaacaaatcagtggaggtttttatgtatgcatattccagataattatttaagtccccaaacgtgtgccgtgcttgcagcggccgctattccagtcattggcttggcactcaagaaagttaaataccaagtcaccgaaaaaaaagaaacggtacccatgttagggatttccgcttcactatcgtttttgatgatgatgtttaacgtgccaattcctggcggtacaaccgcccatgctgttggtgcaaccctattagcgattctcattgggccgtacgccgctagtctagcggtaacgattgcactcatcatgcaggcctttttatttggtgatggtgggattcttgcactcggggccaatattttcaacatggccattatcatgccatttgtcggctatggtctctatcgactattccaaaaagcacaccatcccaaagtgggagtcgtagttggcgcatatctcgggattaatgccgccgcattaatggccggtattgaacttggtctgcaaccgctcgttgcgcataacgcagctggccaacccatgtatgccccttatccgttacacattgcaattccagccatgttgttcgctcatttattagtcgctggttgggttgaagccggctttaccctcgccgtttatcaattcatttgccgggttgcacctaacgaactgttcgttgcaccacgtcaaacagttgatccacaaaccagccgtcgcttacatcacgcgctttacagtttcatcggcctattgactatcttatcgccgattggcctattagctagtggtactgcttggggcgaatggagcgtaagcgaactcgttgcacaactcaaacatgatcacctaggtcacagtctaccaagtggtatggcccatggcttaaactttaatgccctctttagtgactacacagttgctggcgttccactatcacttggctacatcttatcagcggtaacagccgtcattgttttttatcttatcggaaaactggtgatgaatcattattcaacccaatcctaaattaccaacttggcttcaaacaacggaagctacgcccaaaacggtcgcgcaattcgaccgttttttaattcaaaatttgcgctttagtgatcgtttgctgcggcgctttaatcaaacaaaacctcaacctttaatcgcccatcaaacgcctggtattcaactgattagtttattggtgacactcatcattctcgtgttaacccatagtctacttttaatttggttgattggtttattgacgttaattcgaatttgccgcttaccaagccagcatttatggccgctttttaaacgcgtcggtgatatcagtatcattgcgattttattaattctaccgaatttttggctcggccaagtcgccacaacgcttttatttatcgtacggactgaaatcatgttattaaatattgctttctttctcgagacgatcacttggcccgcttttattgttgctttacgtcaattaagactccccagtctgctcattttgacactcgaaattagtctgaaatacagccacttgctcgcccaatttttacaagaatccctctgggcaattcggctacgctcaactggtaaaagccaccaacgacaaaatttagtcggttcactgattggccgcctctacttaagttcccgcaactacattaccgctttatacgatgcgatgattctccggggctacaccggacaagtcacccgacggacgccgctaacagtgaatcgctacgactggcgcttaatcagctgggatctagggctattttgcctattctgtttcattcggaggtaatcagatgctgaatttgcaacacattcactacgcctatacgcaaaccgacagccttaacgatatttctcttaccatcgatgcaggcgaggccgtcgcgtttatggggcctaatggttccggaaaatcgacgctgtttaaattaattaacggtttgattcagcccagcgcaggccaatattattttaaagaccaacttgtcgatgcccgcttcctcaaaaagcctgcacaggcgactgccctccaccgcgcaatcggctttgtgttccaaaatagtgacgttcaattatttaacgaaacggtgcgcgccgaactcgcttttggtccagaacagatgggcttagccccagatgaagtgcaaacccgcgttgacgattgcctcgcgttgttacaaatcgaacacttagctgatcgcgtcccttatcaactttccggtggcgaaaaaaaactcgtcgctttgggcagtgtgctaacgatgaatcctgaaataattgtgctcgatgaaccattcaacggcctatcagccgcctaccaaacgctgattatccacttgctccagcaactcaatcaagccggcaaagggattttaattgcaagccacaacctggctcaagtcaaacaagtcgctaaacgggtggtcgtctttaatgaagaccatcaagtgacccatgacttaccactcgcaaaacttgaacaagaaccggaactgcaacgaactttagcattactctaaagagagtgtgttgtagttactgttaatcgcaggcatataactgatagcacaaatatgcggatatcaaaagcggcggatggcacaaaaataatttttgtgtcatccgccgcttttgcattttatattaatcgccttcgatttgtaaccatccctctgtcgcattgaccgtgattgactgtccaatcggtaacgttaaaatcggctgggtatgaccaacattaacgttgtacaaaacggggattgtcttcaaaatcggaaacttattcaaaatagcgattaaatctgtctcactcagcgcgacatcggttggaatacgaccgataatcagggccttcggatgttccatactctgtaataatgccgccaaattgcgtgaaaaatcaaacggatctgacccatctgagcactcaatcaataacacttgatcattataatccggttgataggctgtcccttgtaatgtataaagtgtatttaaattaccgcccactaacgtcccagttacacagccagacgtataactctgccaacgattaggctggtaatcccgcgctgcattcggtaagtaccacgcatcactcgaccactctttggaagccgccaaccgaattggtccagcctcctgcgtcatgactttttgccaattatgcgcttgataatcgcccaactgatctaccaatttaaacgaaatataggatggtccataatacgttatcaagcctgtcttagctgtcatcgcatttgccagcgcgctaaaatcggaataaccgcagattattttaggatggcttgcaatcaaatcaaaatcgatatagggaagtagttcattgctgttataaccaccagtcaccgctaaaatcgctttgacattgtcatctatgaaagcagcgtgcaaatcggcaatccgcgcttcaattggactagaattgaattggtccattaccaagacatgctgcccaaacgtcacctgataaccaagtgcactcaatcgatcattcgccggttgattagccacataaccgccaacactttgcaaactattactaggcgcgatgacccgaatctcatcaccttctgacaatcgtgtaggaatcatcttaattcacgcctctccgttaccacttcaaaacgctcacataaacaggcaattgtcggcgtaaacacctgccctgcctctgcatattcagctttaaaaaaaggctcgtgaactgaacgccaataagcaagggttcgatcaccctcgccctctaaaaaggcatgttcagcgtcgacttgattatacttaacaatcgtgcacattatcgttttcgtaattgcaaccggccggtctcgtccatctaaaataacatcataatcccccacatgtgggacatgctcatcgggttcatacaactcaatcgcagaagtggtggccgttttttgaccgattattaccaatcgtgccaattcattggccatttgttctgtattcccaaatgaataaatctccgctggttgtaaatcaggtggtaactgctgttgttctataaaatgttgccaatactggctcacttctggtgtcattgacatcccctcttccattcgtaacgttgttgttagtttagcagaatttaaccatttaaccaaaaaaagaaacttacccattaggataagtttcttttgatattttatgcccaccgacgcatctttttaagcatcatcggatagcttttaattaggaaccattgtttcatcttaccggttgtttggtcggcacgaatcccagcaatccctttttcaagcatctgttcaaaagtgattgttggttctgtctactgaccatcaacgtaacacagttggcaatactgatttgacttggtgccatcttgttcactaccttggttttgtgcagtcagtggcatgccacaactttgacagaatttttccatgggtggactcctttaacgtgcttttcaaaccatgttcctacgtttagcctaattagccaaacaatcggcttcgccgcttattcgtctaattttgctaatcctcagaacataaccagtttgaacacacttattttcttaacgtgctttcatcaacagtttcctgcgctttgctacacttatcaaatcatcgactatgtcgctaattcgttaagttatgcaaatgctcagaagctaaccgttgatgacgcacttcttttatttaacgtgcttttcaaaccatatgcctgtgcctagcgacacaagtcaaacgattgcttgcagcaatcatttgacttgttggactagtgctcggaatatacccggtttgaacgcacttcttctttaacgagcttgaacgcacccattttatttaatattcttcaagaagttaagcaacattgctgctgatttttggcctgcttctacgatgaattcgtcaaacgttacgccggcttcttcgtcgccgacgtcgctcattgcgcgaatgacaacgaatggaatcttgaattgcgttgcgacttgaccaatgatgacgcacttcttttatttaatattcttcaagaagttaagcaacattgctgctgatttttggcctgcttctacgatgaattcgtcaaacgttacgccggcttcttcgtcgccgacgtcgctcattgcgcgaatgacaacgaatggaatcttgaattgcgttgcaacttgtccaattgcagcgccttccatttcacaagagagcgcttcggggtaaatttctttgattgccttgattttatcttggctcgcaacaaattgatcaccggtgacaattaaaccaacacgtggttgtatgtcaaccgctttagccgccgcttcgatttgttgaacgatcttagcatcactttcaaatcgttggggttgttgtggtaattgacctggtaagtaaccaaaggcagttgcttctgcatcgtgataagcgacttcgcttgaaatcacgacgtcgccgacatgaaggccttcaccaatcccaccagctgaaccggtattaatcacaacatctggtttttcttcggctaataaaatcgccgtcgtcatcccagcctgcaccttaccaattcctgattcaaccaacgtcacttcatgaccgtacaattgacctttataaaaggtattgccagcaaccgtgtgttgttgcacatcttctaattttgttaaaagcgtccgaatttcttcttccatggcgcaaatgacactaattttcatactaactctctccattctaaaaaaacattaactttaccattctataggaaaaaaagaatcaagtaaacgataataattaagccaaaggtaatcccaatcgcccaattcaaccgtttcttcattcgtttaaccgctggtggatcgactttcttagtccgacgcgttgctgtttctggttcgtcttcagtcaccgctttaagggcttctttttgttgttcacgtgcatattcacgttctgtcctgaggcgctcttgatcgcgctgtttaaaggcggcttcttcagcctctttttgttgtcgatattcttcgcgcgtcttaggttcattcgtcatttctaccgctcctattttgcttgtaattgccagtaatacaacgccataatcgttttggcatcacagattaaaccatctgcaacggctgcttgtgcttcttctaacgtcaacttttcgacgttcaagaactcatcgtcatctagcgagcgcttatgcgtgaccggcgttagtgtatcagtgtagtataaagtcattaattcatttgaaaaaccgggtgatgaaaagaaatccgtcacgtgcacgagcttttgcgtcgtcaaacccgtttcttcattcaattcacgtagtgcgacctgatctaagttcttttcacctggatcaatctttccagcaggaatttctaacgtttcacgttgcatgggggcgcgccattgtcgcactaaaaggatgcggttatccgccgtaatcggaataatgccaaccgccccatgatgatagacaatctcgcgacttgcggtttgtccatttggcagtgccacttgttgaacggcaagatcaatgatctggcctttgaataatgtttcttccgagaggaccttttctgtataatccatctgctaatgccacctttaccgtttaatcgctattatacgcgcatttaaaatcgtccgccatcgtcaatgctaaattcaggttcacggccgaattaaaaatccatccttaggcggatactcttttatcttaattcctgttagaatgaaggcatcaattaaatcaggagctgacaattatgtttaaaaaaataacgatttggtgcacaggcatgctcattacacttgtctcaatcccaattttggcaacatgctttgatatttatggtgattgggataatttcatctggttcagccttggtttattattagggctgatctacgttacaatcagcctcaaacggcttaaacgacaaccagaatataaaaaagatcagcatatttcaccacaaatgctgaaacactaccaagatgctggcatgagtgatgacgaaattgactttttcagacaaacgatgcaacaagccgaagcgcaaattaaggtacttgcaaccaacatgcaagctcttcctaaattacgggcaatcgatttaaatcacgatacaaccaaggtcagccaatcgctttttcgtgcgattgtgaaagatccaaagcggcttcacaatgctggcgactttttataccggcacttaccatcaatcaatgaactgactagcaaatacatcgaaattaaccatcatgaagtcaagacagccgatacctatctcgttttagataaatcggctgcggcaattgatgcgcttagtcaacagattcaacaagactacgcggatttcgtggccgaagacgtcgatgacttagacacagaagtctccgtcgctcaacaacaaatcaccccagatcacaaggaggaagactaatgtctgaaacgcccaatccaacaaacgatttaatgaatgatttattaaaagatcctttcgaccaaagtgcgccagttgtcactgaggaagcagccccccaggcagaggcctcaattatcaataagctctcccctgaacaacaagcacaggccgaacaattggcacaacaactggacgtcaacgaccaacaagccgtcttgaattacggcgctcaagcccaaaagaaactcggcgctttctcccaaacaatgctcaaccaagtccaaagccaagaaacaggcgaaattggtgacgcattaacgtcattgatgtaccgtttaaacgaagccaatcctgacgaattacgcgccgaagacagcaacgttttcaagcggatgtttggcaagattaagaagtcggtctatgaaatcactgcgaaatatcaaaaaattggcgcccaaattgatgggattgccgttaaattggacaaagaaaaaaatgcattaatgcgcgacaatgagacgcttgaaacgttgtatgcgaagaataaagcctacttcgatgcactcaatatttatattgctgctggtcagttgaagattcaagaattagaaacaacgacgattccagaagccatggaacgcgccaaaaatgacgataatcaaatggtcgtgcaagaagttaatgatctcaatcaattcaagaaccgcttggaaaaacgaacttatgatttagaattagcacggcaaatcacgttgcaacaagcaccacagattcgcttgattcaaaataccaaccaagcattagctgaaaagattcaggcttccattaacacggcgattccactctggaaaaaccaagttgccatcgccctcaccctgctccgtcaaaaagatgcggtcactgcacaacgacaagtgtctgaaacgaccaatgacctcttgaagaaaaatagtgcgatgttgaagatgtcttcaatcgaaaccgccaaagaaaatgaacgcggcgtcgttgatatcgaaaccttacagaaaacacaaaatgatcttgttgaaaccttacaagaaaccctcaagattcaacaagaaggccgcgaaaaacgccaagtggctgaaaaagaactcaaccacatggaaaatgatctgcgcgaacacttattggcctatacccaaggtcaaaccgctgctaacagcggaccaaaagaagttaattaaatcacaaaaatagcgccgcccatctttttgatgagcggcgctatttttgaatagttaagctattttgcgatgtttcaacatccgccaaccggttagagccgttgcgattaaacaaatcactagcgcaaccataaaggcatcatgcatcccagcgatgaacacattcgcgtgacctggaatataccccgtcactttttgcccgtaattgcgactcattgcggcatataaaaccgtcgttgacaatgaaatcccaaagaccatcccaagattccgcgcgagggcgttaatcccgccagcaatccctagatcttcaacaccgacggaactcatgacaatcgtgttattcggtgcttggaaaatcccattcccaagcccaactaagccaacgaagaacatgaataaccagatcggtgtttgtagattcatcaacatataaccgacctgactgatcgaaatcaacactaacccgataaaggttaacatttctggcccaattcgatccgagatactcccggcaatcggtgcgaccaccacttgaacaattgggaaaatcattaaactgtaaccggcaagattaggcgctaagcctagcgcattttccagatagaatggtgaaatcacattgaagaagaagttaacgatgaaaattaagaacgcacagagtaaactcaaactaaaatcgatatttttaaacaatctaaacgataataatggctgttctacatgttgttcaatccaaacagagatgccagcactaattaaggcaacgacaaaggccgctaaaataattggtgaggtaaatccaatttgttggccgatgaaaatgccgaggaataaactaacaattaaaactacaaaactggcaaacccagcatagtcaattttttcatgtgttttaacaatatccttcggtaaaataaaatgcccaaaaataatggttaaaattccaattggcacgttaatccagaaaatatagccccaactaaaatgcgctaagattagcccaccaatcccgggcccggcaatgctacctaacgcaacgaatgatccggttaaccccaacgctcgcccacgctctttcagtgggaaaacctcggtaataatcccattattattgctcatcgtcattgatgcccctaaagcctgaagaacgcgtgcacctaataacaatggtaagccgccattaaagccacacaacaaggaaccaatcacgaataagaaggttccaattttaaacactttgaccttcccaaaagcatcgccaattttaccgaataataataataaggcacaaatcataatcagataaatcgacacaatccattccgcttgattcatcggaatctttaaatcacggctcatgactggaagtgcaatattaacgatactgccatcaagcgtcgacatgaaggtaaatagtccgacagccgtcaatattcgccaacgatttttttgaacctgcggattatccacataacttaatgccatctgtgagtcactttctttcttttaagtttactccgtctattataccgtggttttagttaattttaattaaaattgtggaggacattatcatgaaagaaggtgtgttattagttaatttggggaccccagataaaccagaagtcaaagaaattcgccattttttaaaacatttcttagctgatcagcgggtcgttgctatgcccaaagcggtttggctccccattaaaagtgtacatgcaacagcaagttgctcaattacaagctgaattacccgattatcaagtttttgaggcgatgtcatatagtcaaccattcttaaccgatgtgcttagtgagattcaaacggcgggaatcgatgatttgacggtcgtgccaatgtatccgcaatattcaacgactacgacgatgtcggtttatgatgtagttgcgcagttttatttaaaacaatcaaacatgccaactttgcattttgtgaaggacttttatcaacgctcaggctatatcgacttgatggcaacggcgattgaacagaagctacagacgcaaacctatgacgaaattattttgtcataccatgggattccaaagtcgtacgtaacaaaaggggatccgtaccaagcacagtgtgaagcaactactgcgctattgcaggcgcgcttgcctaaacaaacttttcggaccacataccaatctaagtttggaccgaatgaatggctaacaccggccactagcactacgatgcagtcattagcccaagaaggcgttagaaaaattttggtcctaaccccgggctttgttgcggattgtttggaagctatcgaagagattgatgttgaaaatcgggactattttatggataatcaaggcgaacaatttgattacattcatccctttaatgctgatccacgatttacggccttattagcccagattgtgcgggacagataatcagggtgcttggcttttgcttaagaaatcaagtcattgttgtgtttaacgggtttgatttgtataataaagagaatgcaagagaaagtaggcaagttgaatgcaacccatgtttaaaattatagttggtctatttgcgacgatgctcgtatcggccgcaattaccccattagtgcgccgcctcgcgtttgttttaggcgcagttgataaaccaaatgcccgccgagtgaataaaaaggcgatgccggcaatgggtggtctggccatttttatcgcgtttacgtttgggaccttcgtattattacgcgggcaattccaaacacacgaacttttcagtatcttcttagcagaatgtatcatcatcatcactgggatgatcgatgatattaaggaattgaatccaaaggaaaagatgctcggtattttattagcagcattggtcatttatttcttagcgggcgtccgcatgaatattttgacaattccatttttaggcacctttgaactaggatggttaagcttcccaatcaccattttttggattctggcaattaccaacgccgttaatctgattgatgggttggatggcttagcaactggcgtttcgattatcgcactcttcacaatgggcgtcatcgcctatttcttcttatcaatcaccaatgtcagcgtctcaatcatgattttttgtttggtcgctgcattaatcggtttcttaccacataacttccatccagcgaagattttcttgggggataccggggccttattcattggttttatgattgcggtcttatcgctcaaaggtttaaaaaacgtgacgttcattacgttattgattccagttattattctcggtgtaccaattacggatacaatttacgcaatgttgcgccgaattttgaataaaaagcccatttcacaagcagataaacatcatttacaccatcgtttgatgcaacttggtttatcacatcgccaaacggttctcgtgatttatggactggcattggtcttctcgttgatttcattgctctacccactatcgacactctggggaagcttggcattgacggtagccgtcttaattggcttagaattatttgttgaatcaattgggttacttggtgacaatcgccgcccattattgatgcttttaaaacgattattaaaaccgaagaatgaagaaaaggattagccattggctaatccttttcttgcgttattggtagcgaatctggtgtaaatcctgtgcgctaatggggacttcgttgaattgttgagggccaaggtcgaattgtaattggccgttgaggcgttcggttaattgttgttgtaaatcactaactgctgtagtcgctaaccagacggtcatttgaatgttagtcgtatattggatgtcttcggcagtgaggtttaattggctaagtaaattttgcacagtgtcaaattgagcgtagtcaattgtaatctgacaagcggtttgttcgataccttggacaataccgaggtgttcaagtccggccgaagtggcgtgactgtatgctcgaataagaccaccagtaccaagtttgatgccaccaaaatagcgggtgacaacgacacacagattagtgagctgcatctggcgcagtacttctaacattggcacgccggctgtgccacttggctcgccatcgtcactttgtttttgaatattggccgttaaacctaattggtaggcgaaacaattatgattggccttcagatttgctttgcgaacttgtgcgatgaacgcttgtgctgcggtttcgtctgtgacacgcgcaacatgacagatgaagcgtgactttttgatttcgagttcaaattcgccgtctttttgaacggtaaaataactttgcataccggactccttgaaaaaataagctggatttaacggaactaaggatggaaggtgaaatgatggcaaaacaacttgcttatggtcgtcagtggagtgccacccaattgagtaccgttatgaataattatagtttaccacagatgaaacagcgaccagcgtttcaaatagttaatcagcgtctggtatgtcaacggtgtggacaagtggtgaaagagcaaactcgcttacctgatggtcggtattattgtgctgcttgcttgacctttgggcggttagtggaaggggatcagttgatttacgtgcctgaatgcaatctgtttgagtcgattgtagaaccgctaacttggtcggggacactaaccccttttcaagcacaagccgcaaagcagattgttgcggtcattaccaagcaacaacgccatgtcttaactgcagtgaccggtgctggtaaaactgagatgttatttcaaggcattgcgacggctttagctaatgggcagcgtgtgtgtgttgctgcgccgcgggtggcggtttgtttagaactctatccgcgcttgcaagcagcgtttgctaacacaccaatcatgctgatgcatggggaacagactgcgccttaccggtatacgccgttagttgtttgtacaacccatcagttatttaagttttatcaggcatttgacactgtcattgtcgatgaggttgatgcgttcccatttgtcaataatccccagcttgagatggctgttaaacaggcgtgtaagccatgctgtgcattgatctatctgacggcgacaccaactgtaaagttgcgccatgcgattaatacaggggatttaacgggtagtgagctaccaattcgctttcatggtcacttattacctgaaccgcattgctatcccttgtttacgtggcggcgttcagttaaacggcatcagttaccatccgtgatgcgcaacttactcaggaagtgtcttcaagaacaacgcttattattatttgtgccacaggtaagggatttagaggcggttcagcagagcgttgttcgggcattgccacacattacagtgaacacggtacatgctggcgatcctaatcaattagacaagatagcggcctttagagtaggatgcggggacgtgctgattacgacgacagttctagaacgaggcgtaacgtttaaaaatattgcagtgtttgttcttggtgcagaacacgtggtcttcactgaatcagtgcttgtacagattgctggccgagccggacgacagcaagagcatgctgccaatccggtttattttttctacgcggattacacggtcgctattcagcgtgcgtgtcaacaaattaaacgacaaaatcgaaaaggacggcgattacaatccactgtttaatgtgtgcggcagttatccttgaacaaccctccattgcattgatttgttcattgcgaccagtctatccggcgatgatctgttcacgttgcatggcacagtttgaacggattgggccgcagtgttgttcgggatgtggtcggcaaatgacaacccagggggtgtgtccggattgccagagatggcagcaactgtatccaggcgaacaatttactaatcgagcgttgttaacatacaacgaaccaatgcaacagtattttcaacgctataaggggcagggggattatcgattacgtcacgtatttcaacggctgattcgagaaaattttcctgtgcaacggcaaacggcgtatatcccagtcccgactgatccaacacatttgcaaagccgcggattcaatccggtggttggcttatacgaggactgttttccactgaccccattgttgcagaagctaccaactgaaaaaggacaagcacaaaaaaatcgtgcagagcgcttagcaacgccgcaattttttaaatgcgcgcagaacgtgctgttgagttccaaggtgcagcagttaattttgttggatgatatttataccactgggcgcacgttatggcatgctcagcagtgtctccgcaagcgataccaaacgctgccaattcacgcaattactttagtccactaggaccatattatttgtgtgttacgcgcaaattatatataatgaagtcagtaacaaagcctcgggaaagaattgagttccgagcgacaagtgcccacagggggtatttgtgaaaggggagaattcatatgctaagttttaatgttcgtggtgaaaatattgaggtaactgacgcaattcggagttatgttgaaaagaaaatcagcaaactcgaaaaatatttcgatgattcagcgaccgcaactgcacacgttaatttaaaagtgtactccgataaaaccgctaaggtggaagtcaccattccattaccataccttgtattaagagcagaagaaacatcgcctgatatgtatggtagcgtcgacctagttactgataaattagaaagacaaattcgtaaatttaaaacaaagattaaccgtaaatcacgtgaacgcgggattaaaggtatggaattaacggtgccagaagcagaagcattaccagaagaatcaatgcaagtcgttcgaacaaaacgcgtttcattgaaaccaatggatagtgaagaagcaatcttacaaatgaatatgctaggccatgagttcttcatcttcgaagattcagaaacaaacggtacaagcattgtttataaacgtcaagatggtcgttacggtttgattgaaactgatgaataagtgaacgttaagttagggctgggacaacgatgagttgcgctcagccctttttttgtagccatatagataatggggttaaatttttactgaattggctggattgtttactgtgacagggttttatttgattgtaataaatggtaaaatgaattgttagtaatcatattgactatataagaaatcgctatttaagaactcaaacgtatttctagaggagaattgacgcacatggcaaactttctaaaaacatgggtagaaagcgataaacgtgaagtagcgcgaatgggcaaaattgccgatcaagttcaaagctatgaagatgaatatagtaatttatctgatgaagcgttgcaagctaagaccccagaattcaaaacaagattagcaaatggtgaaacattagacgatattttaccagaagcttttgcggttgcgcgtgaaggtgctaaacgtgttttagggttattcccgttccgtgtacaaattattggtgggattacgctacacgaaggtaacatcgctgaaatgaaaactggtgaagggaaaaccttaacggctaccatgcctgtttatttaaatgcattggctggtaaaggcgttcacgttgttaccgtcaacgaatacctttcaagtcgtgatgcaacggaaatgggtgaattatataactggctcggtctttctgttgggttaaacttaaatgctaagacaccagaagaaaaacgcgacgcatacaactcagatatcacttattcaacgaatagtgaacttgggtttgattacttgcgcgataacatggtggtttacaaagaagaaatggttcaacgaccattgaactttgccattgtcgatgaagtggattcaattttaattgatgaagcgcggacaccattgattatttctggtcaagctgaaaagtcaacagcactttatatccgtgctgatcgttttgttaaaactttaaaagaagaaactgactataagattgattggccaacaaagaccatcagtctaacagaatcagggattgaaaaagctgaggctaacttcggcttggacaatttatatgacactgaaaatacagccttgacgcatcatttggacgaatcattacgggccaactatatcatgttaaaagacattgattatgtggttcaagaaggcgaagtcctaattgttgaccaatttacaggtcgtgtgatggatggtcgtcgttattcagatggattacatcaagcgattgaagccaaagaaggcgttgaaatccaagatgaaaccaaaacaatggcgaatatcacataccaaaattattttagaatgtacaacaagttatcagggatgactgggacggcgaagaccgaagaagaagaattccgcgaaatttacaacatggaagttatctcaattccaactaaccgcccaattgcccgaatcgataaaccagatgtgctttatccaactttggaaagtaaatttaaggcggttattgaagatatcaaggaacgttatactaagggccaaccagtattggttgggaccgttgcggttgaatcttcagaattactatcgcgattactagatgaaaataacgtgccacacgctgttttgaatgctaagaatcactttaaagaagctgaaattatcatgaatgctggtcaacgtggtgcggtcactatcgctactaatatggctggtcgtgggactgatattaaattaggacctggtgtgacggatttaggcggtttggctgttattgggactgaacgtcatgaatcacgccggattgataaccaacttcgaggccgtgctggtcgtcaaggggatcctggtgtcacacaattctacatgtcattggaagatgacttgatgaaacgtttcggttcagaacggattaaagccttcctagaccggatgaagatttcagatgacgatgcggtgatccaaagtaagatgattacgcgtcaagttgaagccgcacaaaaacgggttgaagggaataactacgatacacgtaaacaaacccttcaatacgatgatgtgatgcgtgaacaacgtgaagtcatctataaacaacggatgcaggtcatcatggcggaagataatttgaaagaagttatcatgccaatgatttcaagaaccgttaaacggattgtgcaattgcatacacaaggtgaaatggggagctgggaattagaagcaatccacgcatttgccacaacttcaatggtcagtgaagaagaattaccaattgaaaaattacaaggtaagactgctgaagaaatcgaatcattattgatgacctttgcagaaaagaattacgcaacaaaacaaaaacaattagcagatgcagatcaaatgctcgaattcgaaaaagtcgttatcctccgtgtggtagatgaacgctggaccgatcatatcgatgcaatggatcaattacgcaactcaatcggattacggggctacggtcaaatgaatccattggttgaatatcaagaagaaggttaccggatgtttgaagaaatgatcagcgacatcgattacgatacaacccggctcttcatgaaggcggaaatccgtcaaaatattcgacgctaacgcgtagaaaatggctgaggtagttaacttagccattttttaatgggaaaaaatagtggagggactaaaatatggaattaagtgaagcaaaacatcttttagaagcaattgaagctaaaataacgcaatttagggggtcactttgacttagatggcctgcaagaaagcatcgcgcaaaatgaagcgcaaatggcggatcccgatttctggtcggatcaaaaagcagcccaacagttaattgatcaaaataacgccataaaggaaaaatacgacgcttttatgcaacttcaagcgcaatcagaagagctacaagtgacattagagctattacaagaagaacccgatgctgaactccagacgagttttgaagctgatttgacggctgttcaagctcagatgcaacaatatgaactcggacaattactatcgggcgactacgatagcaataacgcgattgttgaattgcatcctggtgctggtggtacggaatctcaggattggggttcaatgcttttgcggatgtacttacgctgggcagatgcacacggctttaccgttgaaacagaagattaccaggccggtgaagaagctgggattaagagtgtgaccttgatgattaaagggcacaacgcgtatggcatgttacgttctgaaaaaggggtccatcggcttgtacgaatttcaccgtttgattcagctgggcgccgccacacctcgttttgttcagtcgatgtgatgccggaattggatgattcgattgatatcgaagtccgcaccgaagacttacgaattgacgtcttccgttcaagcggggctggtgggcaacatatcaataaaacatcatcagccgtgcggttaacgcatttaccaactgggattgttgtttcatcacaggcgcaacggtcgcaattgcaaaaccgcgaaactgcgatgaatatgttgaaggctaaattgtatcaaaaagaacaagaagaacaggcgaaaaaagcggctgctattaagggcgaacagcttgaaattggctggggctcacagattcgctcatacgtattccatccgtacacgatggttaaagaccaccggaccgactacgaaaccggaaacgggcaagcagtcatggatggtgatttggatccatttatgtatgcctatctgcaatggcagttgagtcagaagaatcccgactagctgcaaagaaattgaaatataaatgtaatcaaattgtgattatttgaataaatagcatgctataatataaaagattgcggttttcattgacaataaataatgataacgacaaaaaaaggagtgtccccaattgattcgaatgacaaatgtgtcaaaaaagtatccaaatggcgtgacagcaattaaggatctttcgctaacgattgaacccggcgaatttgcttatattgttggtcccagtggtgctggtaaatcaacattcattaagatgttgtaccatcaattaaaagcaacgagtggtgaaatcgaagtcgctggttttgatttaatcggtatgaaggatcacgatgtcccatacttacgccgtaagatgggtgttgttttccaagatttcaagttattaccacgtttaacggtgtttgaaaacgtggcatacgccatggaagtgatcgaggcagaacctcaagcaatcaaagatcgtgtattagaagtgctcgaactagttggcttgaagggtgaaattcgtcgctttccaaatgaactttctggtggggaacaacaacgggtcgcggttgcacgtgcgattgtgaaccggccagatgtgttgattgccgatgaaccaacggggaatctagatcctgaaacgtcagatggtattatggatattttagaagcaattaatgaacgtgggacgattgtcttaatggcaacccataacaaacaaatggtgaacgaacggacccatcgtgtcttagcgattgaagacggtcgcttagttcgtgatgaaaaagaaggtgactacggctatgaagattagaacattgaagcgtcatatcaacgatagttttaagagtttaaaacgaaatggctggatgtcaatcgcagctgttagtgcagttaccgtaacgttgttattagtcgggattttctttgcgatgatcttcaactttaacaagatttcacaagatattgaaaatgatgtgcacgtgcgggttatgattgaacggggcacaacaagtaaacaaaaagatcagctacaaaagaaacttgaaaaaatggcgtctgttaaagaagtgacgtattcaagtcgtaaaaaggaattaaacaaggttgtcggcagttacggtcaatcatttaagatgtttaccggagacgataatccgttgtacgatgtttacacagtaagtacgacaaaaccaagtcaaacgattaaagtcgctaaacaagcgaaaaaattgaaatacgtttatgatgccacttatggtgggaacaacgctaagaagttgttcaaggtaatgagtagcgtccgtaaatggggcgttggttttactttattattgctctttgtggcagtgttcttgatttccaatacaattcggattacgattttatcgcggcgcgacgaaatcggaattatgcgtttagttggggcaactaacgcgtatattcgctggccattcctttttgaaggggcttgggttggattacttggggtaattattcccattattgtaatcgacttaggttatggttgggtttaccgtcatatggcactcagcatggcttcagccggttattcaatgttgaaaccaggaattttcttattccaacttgatttaacaatggctgtgattgggattgtgattggggcattaggttctgtcatctcaatgcgtcgtttccttaaaatttaaactaaattagtgaaagagtggcgaacattaaattgttcgtcactctttttttttgaaccctaggcagttaagggggcaaaatgctatactgattgggataactgcgaaattcggcagctggaaatcgagcgtgtgtcgttggaaacacgcacggtatttaaatatagacgctgggggtttgttgaattgacgatgatcattgatattttgcgaccattactaacggcaccacttttatggttagcgattgtgtatgctggctggttagcgcatagacgaattagcttggaacggaagacctttagaattgcgattaatccacgatggatagaagtgggccattttgtgggccatgggctactcgcagggctagccttaagttgctgtaccttagtgttaggggcgatggttaatatgcaatggtggctggtctatcaactaatcgctattttgagtttgctagtggctgctagatggcaaaacgtatcggcaacctttttaatcagtgctttggtctacgctggtgcaacattcatatggccccaatatcagatggaaggtcaagcaaatcttttggctgaattattggtgattattgggttagtgaccgtcatcaatagtgttttacaacgttgggatgccgaggcaactgtgacaccgcgtgtgatgactagcaagcgagggcggttgacggccttctttatgagtcgacaaatttatattgcgccggtctttttcttagtgccaggggcaattgatatgccaagtttgggtttttggccggtcttaaatatcgggcatcaatcatatagcttggtaatcttgccattgttattgggatttagtttgaaagcagtcaaaggcttaatgaaatcagttgttactaaaaatgccaatagctatttgatctttggcttgttgttagttgggtttgggttaattgccgttgcatttccgaactggattattggcatgttaacagttgcgctagtactaagctgtgcattacaatggcggttgagtagacgcagtgcccatgaacggcagttgcactttacgaaaccctacgatggcgtctttatcttagggattttacgcgaaacgccggctgctaaaatggggttggtcgttggcgatacaattgttgaatgtaatggcgaggctgtctcaaataacgataatttttatcgggcgattcaaagtcagccaacgtattgccatttaaaggttcaagatttaaacggtgagttccggatggctgaaggcgcaatttttgctgatgcaccacatgagttaggcgttgtattattcccagagaattaagtaaataaagggtggcatgaatgaagacaattttagtggtagacgatgaaccagcaatcttgacattattacgctataacctggaacaagaacattttaaagtgatgacggcaactgacggtgcacaagcgctgacgatggctttacagcagtcgtttgattttattattttagatttaatgttgcctaagctagacggaattaccgttaccaagaagattcgggaggcaaagttaaaaacgccgattatgattctaacggctaaggatagcgaaaccgataaaattgtcggcctcgaagtgggggcagacgactatgtcactaaaccatttagtccacgcgaaattatcgcgcggattcgggcaattgaacggcggacggcacagcctgtagcagtcgttgaaacgcaccctagtgatattttacaagtaggggacttaatggtcgatgaaggcgaagttgtggctaaaaagggcactcagaagctccatttaacgcctaaggagttcgaactccttgtttactttatgcatcggattaacaaggttcaaagccgtgagaaactcttaaatgcggtgtggggctttgattatccagccgaaacgcgaatggttgatattcaagtcagtcatttacgggaaaaaatcgaaacagatccgcgtcatccagtttacttaaaaacggtgcgtggtttcggttatcaattggaggaccccaaccatgaccaaacatgatcaatttagattttatcagctagccactattttagtggctgtttacataggttttattgtgcttgtcaatttggtgattgcccaacaacaagacgcgatgttaaaggaacggggcgccgactatgcgctaatcatcaaacaaccacagtttgatcggcaaaagtggttacgccaaaacggcttacaagttttgacgccaaaatcgccgaataaaacaaagttgcaaaaagcagtgacggatattgtcaatcggaatcattctgccgccaattttagtacgcggcaaacagttaataagcaaccgtatttgttttacgcacaccaagcagatcggcccaactttgtcttagtagtgcctcagcaacagttctggcatacgtggccgaagattgctttatcggtcacgattgtctatttaatcggtagctggatttttctataccgtttctggcggcaacgccgtcatttctttgaccacttgaaaattttagtcgctaatattcatcatattcggcatgaagaagtgcccgaaccgattatttttcaaaaagatgcgtcattatatatcctcgcgcaagaaattaataaattaaatggtgatatgcggcatatgcggcagaagattgccatgcaacagggcagttttgaccgcctaattgaccatttaccggtcggcgtcatggtgattaacgaaaatcgtgaagtcgttttgcacaatgaagcaatggatcggttattggagacgacgattgttactgagaaacacccctatattgatgatatcaagacgtatgaattaacacggatgattgagcacacttttaggtaccgaaagagtcatcaccaagaaattcagttgattcaaaatcaagaacggtttgtggatgcgaatgttgtccaactcaatacggttaaatcgaaattccaagcattagtcattttatatgatttaaccgatgtccggcgcgttgagcagatgcagttggattttgtcagcaatgtgagtcatgaattgaagacgccggtgacggctattacaggctttgctgagacgttgttagctggtgcggcggaagatcctgccacgcaaaagcaattcttacaaatcatctatgacgaaagtacgcgattaactgcgctgattcaagatattttggcgctttcgcatctagatcgtaaggaccaatcgcaagagcaacttgtgaatgtacgtgaattggtgcaggctaatctcgaactgatgcaacaaaaggcacaacaaaagcagttacacgtctccgttgatattccaacggatttagcgattagaattcagaaaatgaagtttaatcaaatcttgaaaaacctaatcgctaacgccatcacgtataataaacaaaacggctcgttggtgattgccgtgcaacttgaaaaagatcaaattgttatccgcgttgtcgataccggtttgggcattccaagtgacctacaagaaagaatttttgaacgattctatcgggttgatcaagcgcgcgcgacccataagagcgggaccggccttggactagcaattgctagcgagattaccgccagtttagaggggcagttgaccgtagagagtcaattaggtgtcggtagtgaattcattttgaagctaccaaacgcttgatttacacaaaatttacatttgataggcttagtttttacaaaccttttttataatggaacttacgaggtttaaatggaattcgtggaggattaacatgcgcaaacgtaatgttattggcttattagtcacattcagtttattactattggctggttgccagtctaaacaaaatggtcagtccgtaacggcggtcggctcatcagcccttcagccgctgattgaagcgttagctgaacaatacagtgctgatcacagcggtcagttcattaacgtccaggggggcggttctgggactggcttgagtcagattcaatctggcgctgtacagatggggaattctgatttatttgctgaagaaaaggctggcattaaagcggacaagctggtcgatcatcgcgtggctgttgtcggcattaccccagtcattaataagcaattagggattaaaaacttaacattgacgcaactcgcgaagatttttagtggcgaaattgataactggcaagacgttggtggaccagatcaaccggttgttttagtaaaccgagcccaaggtagtgggacgcggacgacgtttgaacaatgggtgatgaagtcgcgcaagactaaacccgctcaagaacaagattcaacggggatggtgcgatcaattgtagcgaacacgccaggggccatcagttatcttgctttttcatacgtagatgattcgattgcaatggttaaattaaacggcattgcaccaaccgatgaaaacgtgatgactaatgcatggccaatctggtcatatgaacatgtttacaccaaggggcaaccaactgggttaacaaaacgtttcttggcgtatgtcttatcagatgaggttcaacataaacaagtcggcaagatgggctatattccagttgctaagatgacggttgaacggtcggttgatggcacaattacaaaggttaagtagggggccaattatggatccaattaaagcaagtttacttaagaaatcacgcgcagctaaaagtgaaacacggggcaaattaatcagtttattctgtattagtttaatcgtgttcatcgtgctcgccattttctacttcgtcgcttcaaaagggttagcgaccttctttaaagataaaatcaatctaggccgctttttaacgcagtctaattggaatccaagtttgaaagatagtcatggtcgaccagaagtgggcgccttaccaatgattatggggtcatttggagtgactttcttagcggctttattagcaacaccgtttgcaattggcgctgggatttttatgactgaaatctcacctaagcggggtgaaaaattattgcaaccagtgatggaattgctcgttgggattccatcagttgtttacgggtttatcggattatccgtgattgtaccagctgtccgtcatttgtttggtggcagtggctttgggattcttgccgggacttgtgttttgttcgtcatgattctaccaactgtgacatcgatgacagtcgatgcactcaagagtgtgccacggcattatcgcgaagcctcactcgctttaggtgcaacgcgttggcaaacaacatggaaagtcgttttaaaagcagccacaccagggattttaaccggggttgttttcgggatggcccgggcgtttggtgaagcattggccgtccaaatggtcatcgggaacgctgcgttattaccacataacttaattaccccagcctcaacgttaacgagtgtgttaacgatgggcattgggaatacggtcatgggttcattagccaataatgcactttggtcattggcgttactcttattattgatgtcactactatttaacttattagttcgtttaattggtcggaagggagcaatgggtcgctaatggatgcaaaaaaatgggataaagttgccaccggtgtgctaaccctcatcgctggtttgatcgtattattattagcaagtttgctcggctatatcttggtgcgcggattaccacacgtgacgtggcagtttttaacgaaacctgcgcaaacctttactaaaggtggcgggattggcgtccaactgtttaattcattctatctattaattttggcgatggtgatttcagtaccgttatcaattggtgccggcatctatctcgcagaatatgcgccgaagaactgggtgacgaatgttgttcggaccgcgattgaagtgttaagttccttaccatccgtcgtggtcgggttattcggtttcttggtctttgttatccagtttaagctaggcttttcaatcttagcgggtgctttagccttgaccgttttcaatttaccgttgttaacgcggaatgtggaagatgctttaaaatcaattcacttcacacaacgtgaagcaggtcttgcacttggtttatcgcgttatgaaacggttaagcatgtcgtgattccagaagcgttacccaacattattaccgggatgattttaggcgctggccgggtctttggtgaagcggctgccttgatttatacagctggacaaagtgccccatcacttgattttaccaactggaacccaatgtacatcgcgagtccgttgaatccattgcgacctgcggaaacattagcggtgcacatttggaagattaactcggaagggattatgccggatgcgactgcggtttctgctggcgcatctgccgtcttaatcatcgccgttttactatttaactggttagcacgggtcatcggcaagcgtgtctaccgtaaaatgacagcagcataggagaaaataatggcagattacgatttaacaaaaacgcacatcaaacatttagatgaaccaaaacatgaaattgccttatcaactgaagatttaaacgtctattacggcgacaaacgcgcgatgcacgatgcatcattgcaatttgaacgctatcgaattaccgcgttaatcggcgcttctggttcaggaaagtcaacctatcttcggagtttaaaccggatgaatgacaatattgctaatacacgtgtgaccggtaagattatgtaccggggcttgaacatcaatagcgatgacgttgatgtgtataagatgcgggaacatatcggcatggtgttccaacggcctaatccatttgccaaatcaatctatgacaacatcacttttgccttgaaacaacatggacaaaaagacaaaaagtatctggatgaagtggttgaaacgtcactaaaacaagctgctttgtgggatcaagtcaaagattcattaggaaagagcgcattggcactatctggtgggcaacaacaacggttatgtattgcccgggcaattgcgatgaaacccgatattttattattggacgaaccggcttcagctcttgatccaatttcaacgaacacggttgaagaaacattgattcgcttaaaagaagaatttacaatcatcattgtgacgcataacatgcaacaagcagcacgaatcagtgattacacggcctttttccattcagggcacgcacttgaattcgacgaaacacgtaaaatgtttacccggccgaagattaaagcggccgaagattatgtttctggtcactttggctaggacgcaaggaggtttgccccgtggcaaataagattattgaatcctcagatgtgcatctattctatggtaagaatgaggccttaaaagggattaatatggattttgttgaaaatgaaattacggcgctcatcgggccatctggttgtgggaaatcaacctacttgcgctgcttgaatcgaatgaatgatttaatcgactcggcgaaggtgaccggtaaattcttattgaatggccaagatatttatgcgcctgagatggataccgttaagttacggaaagaagttggcatggtgttccaacaaccgaacccattcccattttcaatctatgacaatgttgtttacggcttacgtttatccggtgttaaagatcatcgcgtcttagatgaagccgttgaaagtagtttgaaacaagcggccgtttgggacgacgtcaaagataagttacacgaaagtgctttatcactttctggtggtcaacaacagcgggtttgtatcgctcgggtgttagctgtgaaaccgaaagtgatcttaatggatgaaccgacttctgcgctagaccctatttcgagtgctaaaattgaaaatatgttgctagaattgcgccaacagtataccattataatggtgacgcataatatgcatcaggcttctcgtatttcggataagacagcattctttttacaaggtgaattgattgaatacgcaccaacgaagaagattttcttaaacccaaccgaaaaagaaacggaagattacatcagtggccgttttggctaagaaagaagggaaaccacaatgagacgactttttgaagatgagttaaatgatttacacgttcgcttctccgaaatggggatgatggtcaacgaagccatctataaatctgttaaagccttcattaatcacgataagcaactcgcacgcgaggtgattgctgacgatcataagattaatgaacgggaaacggatttggaacgtaagagttttgagttaatcgcacttcaacaaccggtctcaactgaccttcgcgtgattgtcacaatcatgaaggctagttcagatttagaacggatgggtgaccacgccgtttcaatcgcgaaatcaacgattcgggtcaagggtaatacccgtgtccctgatatcgaaaaagatattgcggatatggcagacaaagttaaacaaatggttgaagaggtattggacgcttacgtcaaagaagatcgtaagaaggccatcaaaattgccgatgaagatgttgcaatcaatgcttattcagacaatatttatgacgactgtatcaaagaaatgcaacgtgattcagaaaccgtcgttgggagcatggactacatgttagttgcaagctacctcgaacggattggcgattacgtgacaaacatctgtgaatggattgtctacctcagaaccggtaaggtagtggaattaaactccaatgcacaagaagatgaattctaaacaattcaattaaaaattttaaaaagcgatgacaaggtcgacttgctcgtcgcttttttagtgggagaatcataatgcaaaaacaaatatacttagctggcggttggtttacacctaaacaggcctcattagtggaacgcgcacacgcggctttaaaacaaaacccaacgattggttatattcatagtccacaggaacatcaatacaagggtgtgacagaagatcatgatccagaaggcatgttcggggggtacgaatgggccaaccaaacgtatcaaaacgacatcacagcaatggatttagcagacatggcagttgtgttatgggatatgcaagacgaagatactggaacggcgtttgaagtcggctacttgaatgcctgtcataaaccaatcgtctttgtttgtgaagatgatttacaagccaatcccatcaacctaatgttggctaaagggattacccaatgtctaaccagtgtggatgaattagcaacctttgatttccaatttgtcgccggcgaaccttacccaggacaaatcgtttaagcaaaaaagcgcaggacaaaaataattttgccctgcgctttttttgttctcactcttgatacctaaataaaaatcaacctttggacctatgacaatcgactgtaaaatcggcataatagagtcatagtcaagtgaaacagtacaacgaatgatcaatggaggtcaaaacaatgaatgaacgtcaacgaattttagacttagtgaaccaaggtattttaacttcagaagaagcattagtcttattagaaaatttagccaaaaatgaccaagatgtaaaatcaaatccaactgaaacagcaacggagcaaactgaacaaccaaccgctgataaaagcgcaattgaagaaaaggcacacgaattaaccgttaacctttccggcgttaaccggcagttgcaagatttgaagcaagcaatgcacgctgatcaagaacaagtcactgtccttgatacgatggaagatttagatagtttaagcagtgaaaaagcaaccgaacggcaaacactcaaggctggcttattacaaaagcaagctgaagtcgacgagttggaagccaaacgcgaagcattgacggatgaactcaaccaaatcgaaaaagaacgccgccaaatgaccaaaaatcaatggtcagaaaaattaggcttatcagatgactggaaagaaaatgccagtgaaacatttgatgaattgagcgataagttaggcgaagctagcacacactttggtaagttcgtgaagaatactgccaaaacagtcatggataatgtggattggaaagaagtaaactttaaggtgcctggtttggcaactgaaaagttcagccatgaattcgtttattctgacgtaacaccagaaatgattaacgtcaaagtggctaacggtagtgtacatttccaaatctgggatcgtccagaagtcaaagtcgcagcgcaagtgaagttatatggtaaaatggcagaagcaacaccattggctgcttttgaagcgcgcagtacaattgatgtgactgatgccgacttggtcttccaagtgccgaataaacggattcaagcggacttaacgttctacttaccagccaataactacttacaaacgaatgtgaagttattgaacggggatgttgaattagatggctttaccggccgggatatttacttgaagacgactaacggtgaattaacgttaatcagcaccaacgctgcaatggtggaagctgaaaacgtcaacggtggcattacctttgatcaaggccgttacgatgatttactcgcaacaaccgtcaacggtaacctattgattcaagcgcaagttttaaatgcgagtgtttcaacggtcaacggggatatcaagaacactttgacgacaactgatttacaacatctaaaagcaaaatctgtgaatggcacaatcaagacagctttaccacaaactttggcaatgactgttgatgcccgcacgcgttttgggatgattaaaaatcggcttgcaaacacccaaaccatcgaacaacggcaaagtacggggaatcaaatgttacaacttggccgtaacgacaatgaacaggcagctcgtttaacattaagcacgacaactggtaatattttattgaaagacaacgataactaaaaaattaaggaatggtgggttttaacaatggggaaaagactttataaatcaagagataacaaaatgatttctggtgtaatgggcgggattgctgagtattttaatattgatgcgacattagttcgaattctatatgttgtattctcaatgttttcagcagcgttccctgggattgtggtctacatcatcttagtgatggtgattccagaacggccacgtcagagtaaacatgattctgaaagtgaatggagtgagttttaatgccttttttaatgattttattagtcattatcgccattatggcggcagttggtgtgtttagtctcgtgattggctcgctactgttattattaaaatttgcgctaccactgattgtgattgggttaattgtcagcttcatctaccgggcaattgctggcccaagtagacgtccacggcatgcagactggtgccatgactaccaagactattcttatcaagaaacagcacatcaaggtagccgtcaacgcaaggaagcccgtgatgtcaaagtagacgatgatgactggagtgatttctaatgcggtattggacacgcgtaattgttgatactttgttattcattgcgatttctggcttattgcccaatttattctatgttgaaaacatttggatcgcgttagtcgccagcattgtgttatcgattttaaacatctttattaaaccattgttgagcttactctcatttccaattacgtttttaacattcggtttgtttagtgtcgtgattaacgggattatgttagaattgaccgctgttttcgtcggcgcccactttagctttacaagttttggagcagccgtgatcgtggctatcattttatcaattgccaatacgattattacaaatcaatttgtgagagagcgttattaaaaagttagcgggactgacgtcaattaagattgacattggtcccgttttttttgtttagataagaaaacgcctacattaaagttgaaaaatcaccctaaaagcaatatgatagaggatataagtgaaaatgaaggacgggtaactcatggctgatagtgtttcaattcaaaaactagtcaccgatttaaaattacaagtttatgccggtgaagcacatttaaaaaataaagcagtgacggtgagtgatatttcccgtccaggactcgaattaacgggctactttaattactacccttacgagcgggtgcaattatttggacggacggaagtttcatttacgcaaaatatgacaccagaagaacggttaatgattatgcgtcggatggcttctgaagatacgccctgtttcttggtctcgcgccaattagaaccgccaatggaaatgcttaaagcagctgaagaagcggggattcccgtgttggggtcgaatttatcgacaacgcgtttgtcgagtttagtaaccgattatttggaagggaagctagctgaacggcgctcaatgcatggtgtgttagtcgatatttacggtttaggtgttttaattactggcgattcaggtgttgggaagagcgaaacggcattggaattagtcaaacggggtcatcggttgattgctgatgatcgggtcgacgtttatcaacaagatgaacaaaccgtggtcggtgaagcacctgcaattttgcgtcacttacttgaaattcggggcatcgggattattgatgtgatgaacctctttggtgctggtgcggtgcgggctgaaacgtcaatttcgttaattgtccacttgcaaaattggtcacaggataagaaatacgatcgcttaggttcagataccgaagaacaaatgattttcgacgtccctgtaccgaagattaccgtgcccgttaaagtcgggcggaacttggccatcattattgaagtggcggcaatgaacttccgggctaaatcaatgggctatgatgcaacgaagaccttcgaagccaatctaggcaagttaattgaagccaattcagatgaagaagaatagttaaaagtcagaaaagttcgttaaatatggtaggcctaatgactagtttgagctatactgttagaaagacagtatgcaaactagtcttttttagagtgcgcagtaagccgggtatatcctgaggtttaacacagaatggcgaaggattgcgtcagtaatcgtttgacattcaggggtaaccggaaggatatggcttacggagcacgtttcggataagagtgcattcaagcttgtccaacttttgcgcattagcacagtgaagcgataagcgacgcagtcgattgtttgcttcacgacgctaagcgcagaaagttagcttgaaaagtacgttttgatgaaagcacatttacaaaaggagcgaataatttgaatctactattaggcgcattaaatccgattgcattacgattgggcgcattggagatccactggtatggtgtgattatcgcaactggggtcgttttagccgttggattggcattacaggaagctagacggcgcaatgtcagtgaagatgatattttaaatttaattttatgggcattaccatttgccttaattggggcccgactgtattacgtcgtttttgaatggtcgtattaccaagccaatcccggcgaaattattcagatttggcacggcgggatcgcgatttacggtggactgattgcagctgccattgtgttcattatctattgtcggcgtcatgcactatcgccttggttagtgttggatattgcggcaccaaccgtgatgatcgcacaagcaatcggacgttggggcaactttatgaaccaagaagcctatggggcgccaacaacattgcactttctccaatcgttacacttacctgattgggtgatccaacagatgttaattgatggtgcgtatcgtcagccgacattcttatatgaatcagcatggaatgtattagggtttattatcatcatgagcattcgccatcgaactggttggtataaacaaggcgaaatcttatttagctatttaatttggtattcgtttggccggttcttcattgaaggcatgcggactgatagtttattcatcggtccattgcgggtatcgcagattgtctcactcgtcttattctttggtgcaattggtctttggatttggcggcgtaagcacagtcagttaccggattatttaaccggcaatcaagcaaaagaacagaaatagggatttgtttaaaaggagaattatcagatgacagtaaaaattgcagttttaggggccggttcatgggggaccatcttagcaaacttattagtggaaaatggccaccaagttgagttgtggggcaatgatcctaaaaaagtcgctgaaataaatgaacagcataccaatacacattatttaccagattttaaaattgatccccagttacacgcaacgattgatcttaacgttgcacttgaccaagttgacgttgtcttgtttgtaattccaacacaagcgattcgtgcggtggcggaacagattgttcctgtgatgattgcgaaaaaagtgaaacccgtgattgtgacggcttcaaaagggcttgaacaaggcacgcacaaacggatttcagaagtcttgacagaagccattccagaaaccaaccgcaatgggattgttgttttatcgggtcctagtcatgctgaagatgtcgcacaaaaagatattactaccttaactgccgcatcaagtgacttgattcaagcccaatggatccaagagattttcatgaatgattatttccgcttatataccaaccctgatgtggttggtgttgagatgggagctgctttgaaaaacgtcattgcacttggcgcgggcgctttaaacgggcttggttatggagataatacgaaggccgccttgatgacgcgtggcttagctgaaatttcccgcttaggcgttgccatgggggctaacccattaacctttatcggattatccggtgttggggatttaatcgtgactgggaccagtgttcactcgagaaactggcgtgcgggaaatgcacttggtaaaggtcaaaaattagctgatgtgctagccaatatggggatggtcgtcgaaggggtcgcaacatgtaaagcagcctatgaattggctcaacaacgttctgttgatatgccaatcacacgggccatctataatgtattgtatgaagattgtgatattaagactgaaattgcgtatttaatgcggcgttcaggtaaacctgaaatcgattttgatgaagtctaaaactttttaacgaataaagcggcatcattttgaatgggtatcgcacccatcatcagagtgtgttatgatgattagcgttgagaaaaaggctaaaggagaaccgattactttatgggcgatttggtatctgtaagaccaacttgtgagttttattttgacagagggatgcaggcgtttgaacgatttcagtacacgcgcgcattaacgtgtttacaacgggcaaagtcgctggctaagaccaaagatgattacatctttgtggtgtgccaattagcgatttgtttggaatcggttggcgactatcatggtgcggcgaccgttctggaagaaattccaaccgccaactatcagagtcatcctgagttacaatattttttagcaacggcgtatgcctttttaaatcagacgcaggctagctatgaattagcgactgcttatttacagagtgacgattcggatttcgatgccgaagccactgaattattacaagaattgaaaccaacaagtccatcaaactggtaaaacagtttggtagacttttttttacataacgggtaagatacattctatgaagaacgagcactttttaaaagtaaggggataatagacatggttaaaagttatgatgtaattgtgattggcgcaggacctggtgggatgaccgctgctttatacgcctcacgtgcgaatttatctgtattgatgttggaccgcggaatttacgggggccaaatgaataatacagcagaggtcgaaaattatcccggctttaaatcaatccttggtcctgaactaggcgaaaagatgtatgccagcgccactcaatttggtgctgaatacggctatggtacggtcaactcgattgaactgcaaggcgagatgaagattgtgcacactgacgaaggcgatttcgaagcgcgttcaatcatcattgcaacgggttcagaacacaagaagattgggatccccggtgaagatgaattcggcggtcgtggtgtctcatactgtgcggtctgtgatggtgccttctttaagaataaagaagtcgtggtcattggtgggggcgattcagcgattgaagaaggcctctacttgacgcaattagccagcaaggtgacagtcattcatcgtcgtgatgaactacgcgctcaaaagattttacaagatcgtgcatttgctaacgacaagatggacttcatctggaatgcacaagtgacaactattgaaggtgacgacaagaaggtaaccggtgtcacttacattgataaggtaactggtgaaaccaaagaagttgctgcaagtggggtcttcatctatgtagggattgaaccaatgactagtgcctttggtgatctagggattctaacggatgccggttggattaaaacggatgaccacatggcaaccagtgttccaggtatctacgcaattggtgacgttcgtgaaaaagatcttcgtcaaattacaacagcagttggcgacggcggcatagcaggccaagaagtatttaaatacttacaaagtatctagagtgcgacggcagccggttagcttccgaggattaacacagaatggcgaaggattgcggtagcaatcgtttgacattcagggttaaccagaaaagacagttcgaggaagcacgattagagtgcgttcgaaacgattttatttttgaggattaacctaaaaatgtggcttatgacgcacatttccagcggtcgactaaattttagtcggccgtttttttattttgggaaaaattttaatttttagaaggacaagcattattaaataatcgacccagacaattagcttggtgcgcattaccgtacaaccgatgctttaggaaagcggttgattatggtatacttagaactagcttttagactaaaatgcgggggttacacaatgagctggcaagataattatgcaatttggaataatcaaacagaaatggatttacctttaaaaaaagcacttaacgaaatggcaaacgaccatgatgcattagaaaaagcatttagcgttccaatggaatttgggacagctgggatgcgcggtattttaggccctgggatcaactgcatgaacatttatacggtgcgtcaagccacagaaggcctcgctcaattcatggaaacattaccagaagcgactaaaaaacgcggtgtggctatcagttttgattcacgttatcaatctgaaacatttgcgcacgaagcagcacgggtcttaggtcaacatcaaatcccaacttttgtttttgatgccttacgcccaacacctgaattatcatttaccgtacggcacttacatacctatgccggtatcatgattacagcaagtcataatcctaaacaatacaatggttacaagatttatggcgaagacggcgcgcaaatgccacctaaggaatccgatttaatcacaagttatatccgcaaagtaaccgatttatttgcgattgaagtggctgatgaaagcacattgcgcgaagccggcttaatgactttgattggcgaaaatgtggatcaagcttacttagctgaagttaagcaagtcacgattaatcaagaattggtcgacacagtcggcaagaccatgtcattgatttacacgccacttcatgggaccgggaaagtacttggtgaacgcgcattgcgtcaagcaggctttgaacaatttacaatggtcgctgaacaagcggttgctgatccagaatttgcaacgacaccattccctaatccagaattcccacaaacattcgatatggcgattgaactcgggaaagcacaacaagctgacttgttgattgcgactgatccagatgctgaccgtttgggcgccgctgtgcgtcaaccagacgggagttaccaattgatgactgggaaccaaatcgcatctgttttattacgttatattttacaagctagtaaagatgctggcacattaccagccaatgcagcggctgttaagtcaatcgtgtcaacagaattggcaacgaagattgcagcaagctacaatgtgaagatgatcgatgtcttaaccggcttcaaatttattgctgaacaaattcaacactttgaagacacagatgaaaacaccttcatgtttggtttcgaagaaagctatggctacttagtgaaaccattcgttcgcgataaagatgcgattcaaacattggtcttattagcggaagtcgcagcttactacaagtcaaacggtaagactttgtatgatggcattcaagaattatatgcggaatacggctacttcgctgaacaaacgactgcggttgatttcgaaggggtcaatggcccacaacaaatggctgacttgatggttaaatgtcgtgaagaaagcccagttgaatttgccggcatcaaagttgcttcagcagaagacttccaaacacaaacagaaacttttgcggacggtcatactgaacccatcaatttaccaacatctaacgttctgaaatatcacttagaagatggcacttggattgcgattcgcccaagtgggactgaaccaaaagtgaaattctacgttgggacatcggctgatgatgccgcaacagctgatttgaagttagcgaacttcgaaaaagcaattcatgaacttgtaaaatagatagggcttctgttttacatttcaggataacttacctataataaagaacagcaaatagacggactactgcgttagtcggtctatttttgtaagaaaagggaggcagtttggtatgggtatgcatcaatatttgcaaggtttgaataatttggagacactaaatcgcgcaccaggattgtttaaatatcaagaacattccgttgcagcgcactcctttaaagtagcagaaattgcgcaattattaggcgatattgaagaagaaaatgggcaaacgattaattggcaagtgctgtacgaacgcgcactgaaccacgattatacggaacggtttatcggcgatattaagacgccggtcaaatacgcaacgcatgaattgcggacgatgttggccaatgtcgaaagttcattaaccgctaacttcattaaaaatgaaattccagatttcttacaagaacggtatcaacgtcgtttgagtgaaggaaaagatgaaactttggaagggcaattattagccgttgccgataagattgatttactctacgagtcttttggtgaaattgaaaaaggtaatcctgagaatgcttttctagaaatttttgcggaaagtttaaaaacgattatgcaataccaaaatctcgcatgcgcccgttatttcatccaagaaatcttgccagatttactgagtgaagacttcgcagatcgagggaagctaacccaattagtgagacagacgctagcggaatagagtgccgttgtcagtcgctcagattcagagcatttgcctaacttggcgaattgacgctataagcggcgatttgacaagtgtagcaaagcgcaggaatctactgacaacagcacgtttccacactttagttgaaacgtgctttcattaagcatccttttccggttagctacaccagccgcatcatcgactgcgtcgctaatccgtctggttaggctaatcctcaaaggataaccgcttaatgacgcactctttaatcagcactctggcgaaagtatgttcggtgtggtagaatagtgaatgacttaaaggacaaggaatattattctttataaaatcggtaagtagacgttatggtggagggcaacttctgcccggcgtcttcttttatcgctagcaaatggtaatggaggcttttgatgattgaacgacagaatgataaccaatttgatttagtggcgccctatgaaccagctggggaccaaccagcggcaattgaaacgttaactaagaacttcgaggcgggtgcaaaagcacaagtcttgatgggggcgactgggaccgggaagacctttacgatgtcgaacgtcatcaagaatttaaacaaaccaacattgatcatttcgcataataagactttggcaggccagctctatgccgagtttaagcaatttttcccgaataacgcggtagaatattttgtcagttactacgattattaccaaccagaagcttatgtgccttcaagtgatacctacatcgaaaaagattcgagtattaacgacgaaatcgacaaactacggcattcagcaaccagtgcgctgttggaacgcaacgatgtgattgtggttgcgtcggtttcatgtattttcggcttaggtgatccgaatgaatatcaagatcacgtcctttcgttacggccagggatggagattgagcgcaatgacttattgcgtcaattggtggatattcaatttgaacggaacgacattgatttccaacggggccgtttccgcgtccgtggtgacgtggtcgagattttcccggcttcacgtgatgatcatgcgttgcgggttgaattcttcggcgatgagattgatcgaatcgttgaagttgacgcgctaaccggtgaagtcattggtgaacgcgaacatgttgcgattttcccagcaacgcatttcatgactagtgaagaaaagatggaaaaagccattaagagtatcaaggctgaattagaaggccgactaacggaattgaaggcggacggcaagttgttggaagcccaacgtttggaacaacgaacgaattacgatcttgagatgatgcaagaaatgggctattgctcggggatcgaaaactattcacggcacatggaggatcgtgcggcgggggaaccaccttatacgttgctcgatttcttcccgaaagattcaatcatgatgattgatgaatcccatgtaacgatgccgcaaattcgcgggatgtataacggggatcgtgcccggaagcaaatgttaatcgattatgggttccgattaccaagtgcgcttgataatcggcctttgacgctacctgaattcgaagaacacgtcaatgaaatcatgtacgtttctgcgactccaggcccttatgaagctgaacaaaccgatattcagatcgatcagattattcgaccaactggcttgttagatccgaatattgaggtccggccgattatgggccagattgatgatttggtcggcgaaattaatgatcggattgaaaagaacgaacgcgtctttattacaacgttaaccaagaagatggcggaagatttaactgactatctcaaagaactggggattaaagtccgttacttgcatagtgatatcaagactttggaacgaacggaaattatccgtgatttacggcttggtaagtttgacgtcttaattgggattaacttgttgcgggaagggattgacgtccctgaagtctcgttagtggcgattttggatgccgataaagaaggtttcttgcggagcgagcgctcattgattcaaacaatcggccgtgcttctcggaatcaaaacgggcaagtccttttgtatgccgataagattaccgattcgatgcgcaatgcaatggatgaaaccaagcggcggcgttcgattcaagaagcctacaacgaagcacatcacatgacgccgaagacgattatcaaaccagttcgggatgcgatttcggttgttcaatcagtcgaacaccctgaagaagtcaagatgaccaacgagattgatttcgatagtatgtcgaaagctgaaaaactagaaatggtagaacggttatctgaacaaatgcggaatgcggccaagaaactggacttcgaacaggcagctacgttacgggataccatcttagagattaagagtgaaattgattaaaagaggtaaagcatggcaaatgataagatcgtcattcatggcgcaagagcgcataatttaaaagatattgatgttacaattccacgggataaactggtggttgtgacgggattgtcgggctctgggaagagttcgttagcgtttgatacattatatgccgaaggacaacggcgctacgtcgagagtttatcggcttatgcgcgccaattcttaggccagatggataaaccagatgttgattcaattgatgggctcagtcctgcgatttcgatcgaccaaaaaacaacgtctaaaaatccgcgttcgacagtcgggacagtcacggaaattaatgattatctccggcttttatgggcgcgggtcggtcatccaatctgtccgaacgatgggactgaaattagtagtcaatccgttgaacagatggttgatcgtgtcttagcgttacctgagaagacgaaactccaggtgatgtcaccgattattcgtggcaaaaaagggcaacataaaaaagtatttgaaaaaatccaacgagaaggctatgtccgtgttcaagtcgatagtgaagtcatggacgttagtgccgatatcgaattggataagaataaaaaacacgacattaatatcgtggtggatcgaatcgtcgtcaaagacggtgtccggtcccgtttatttgactcgttcgaagcggctctgcgcttatcagaagggtatgcgactgccgatatcatcggtggcgaacaactacttttctcagaacactatgcctgcccaatctgtggctttacggtgggcgcgttagaaccccgcttgttctcgttcaacgcaccgtttggggcctgcccagactgtgatggtttaggggttaagctagaagtcgatatggatttagtgattcctgataccagcaagacattgcgcgaaggagccattgcgtcttggaatccaattagctctcaatattatccacagatgctcgaacaagcttgcaagtcatttaaaattgacatggatcgaccatttagcaaattaacaccacgccaaaaagacattatcttaaatggttctcagggtaagaacttccacttccattatgaaaatgatttcggtggtgtgcgtgatgtggacgtgccgtttgaaggtgtattagccaatattgaccgccgttatcgtgaaaccaatagtgatttcacacggacgcaaatgcggacgtatatgactgaattaacgtgtcaaacctgtcatggtgctcgtttaaatcgacaagctttggctgttaaagtgggcggccaagatatcgctgccgtttcagacaacgccatcaaagaagctttaccattcttcgatcaacttgaactttctgaaaaagacagtgtggttgccaaaccaatcttgaaagaagtgcatgatcggttaactttcttgattaacgtcggtctggattatttaacgctcagtcggtcagccgggaccctttctggtggggaagcccaacggattcgtttagccacgcaaattggttcgaacttatctggcgtgctctacatcctcgatgaaccgtcaattggtttgcatcaacgtgataatgaccgtttgatcgggtcactgaagaagatgcgcgacttaggcaatacattaattgttgttgaacatgatgaagatacaatgcgcgcggctgattacctgatcgatatcgggcccggcgctggtgaactcggtggtgaagtgatggccgctgggaccccaactgaagtcgaacataatccgaaatcattgacgggccgttatttagccggttccgaatatattccagtaccgctagaacggcgtcaaggcaatggcaagaagattcgcgtgaccggtgcggctgaaaataacttgaagaatctgacggttgatttcccattaggtgaatttgtcgcggttactggtgtttcaggttcaggcaagtcaaccttagtcaatacgattttgaaaaaagctttggcacaaaagatgaaccgtaactcagcaaaaccaggtcaatataaaacaattacaggttatcagaatcttgaaaaactgattaatattgatcaaagtccaattggtcggacaccgcggagtaatccagcaacgtacaccggcgtctttgacaatattcgtgatttgtttgcgcaaaccaatgaagccaaactacgcggttataaaaaaggccgttttagttttaacgttaaaggtggccgctgtgaagcctgcaagggtgacggcattatcaagattgaaatgaatttcttaccagacgtgtatgtgccgtgtgaagtctgtcatggcagtcgctataattcagaaaccttggaagtcgtctataagggcaagaacattgccgaaatcttagacatgacggtcggtgaagccgcagtcttcttcgcaaacattcccaagattgcccgcaagttacaaacgattgtggatgtcggcttaggctacgtcacattgggccagtctgccacaaccttatcgggtggagaagcccaacggatgaagttggcctctgaattacagaaacaatcaacgggtaagaatttatacatcctcgatgaaccaacgactggcttgcataccgacgatatcaagcgcttgttgggcgttttggaacggttagttgaagaaggtaacacgatcttagtgattgaacataacttagatgttattaagactgccgatcacatcattgacttaggaccagaaggcggcgataaaggcgggacaattgtcgcgaccggtacgccagaagaaattgccaacgtcagtgaaagctatacaggccaatatttaaaacctgttttagaacgcgatacagcacgcacaattgccgctcaggattaaccagaagatggttgatagaatgtgtttaaaaagcgggcggttaagacagaatgattgctgtcttaaccgcccactttttgttttgtcaaatttagttgtagattgtccgtaaaaaaagtatcataaaggtattaacaacgagaggtgattgggaatgtttagaaaaaatgaatggcactttgattggtcagaatttatgacggggactattttcttaatcgttgcatattgcttgtttaatcaaccaggtaagacattatctggtttggtaatcgtgattgcgattgcggcgattattcggggaattgccaaaatcagtgcatatagtcggttacgtcaagagacagggatgcgcgcaacgttaatgttggtcgatgccattgtcgatgtcattttgggaattttgtttatcttgaatattccagctggagtggctgctttaggttatatctttgcattctggttcttgttcgattcaattgtggcattattgaatgtcggccatctcaagcaatttaacacaggcctatacatcgtttcgatgattctgaatatcttaggcgtaatcgttgggatcttattgttaatggatccagtggtgactgccgtaacgatggtgaccctagttggtttttactttgctttctttgggattaatgccatcatcatcgcatttgcaagacgtttatagtctctaaatttaatgattgcggaacaatttgattgttctgcaattttttttatggaaaaaataagctctttcaaatgcctagacattaggaatgaactcggtttaatagcattaaataacacgtgtcgagagtttcgacagctttcaatgacacaccaggaatgttacaatgataaaagcgaaaacttaaggggtggtctgatgacagatacattgaacttagtagtgattacagggatgagtggtgccgggaaaaccgttgccatgcaaagttttgaagatctaggttatttttgtgtcgacaatatgccaccgacattgctacctaagttttgggaattggttaaggagtccggcaaagtgactaagattgcattagtgattgatttgcgctcacgtgctttttacgatgagatcattgaaatgcttgctaaccttgataatacccaattcgtgacgactaagattctcttcttggatgcatcagatgaggaattggtttcgcgatacaaggaaacacgccgttcccacccactagcgatggaggggcgtttaatggacggtattcaaaaagaacggcgcctgttaactgaaattcgcaatcgagcacagatggtggtggatacttcaaccatgtcaccacgacaattaagagaaaagatttttcatgtcttcaagacgtcagataatccgtcattccatattgaagtgatgtcatttgggtttaaatacggtttaccaattgatgcggatatcgtcatggatgtccgtttcttaccgaacccatactatgtgccagcatttaaggaattaaacggtttagaccaaccggttagagactatgtaatggcgcagccagcgactgaaaagttctacgaacaatttagtgggctgttaaaagacatcatgccaggttatctcaaggaaggcaaaacaagtgtgacaattgcgattggctgtaccggcgggcaacaccgttcagtagcgcttgcccaacgattggctgatgatttatcgttcgattatccggttgacgtgacccaccgggatatgaagaaacgcaaggaaacggttaaccggtcatgacagctactaatcggattatccgggtcattaaagggcgacgaccaaaagtcgttgtgattggtggcggcactggactacccgttatcttaaagagtctccgtgaacagaatgcggatgctacggcaattgtcacggttgccgatgatggcggttcatccggcgttattcgcgattacattaacgtggtaccacctggtgatattcggaatgtattagtcgccttgtcagatttaccacagttaacgctcgatatttttcaataccgctttaaatcacacgatgcctttttctcagggcatgcgattggtaatttaattattgcggcgttatctgaaatggaatcaggtatttttgatgctgttcaacggttatcagaaatgatggcggttgacggtcatatttatcctgcggccaatgttgcgctgtcgttgaatgctgaatttaaagacggcacccagttaacaggggaatctgagattactgcagcacgcaagcagattaagcgtgtttgggtctcaaaaacggatcaagatgatactgcagcacccgaagccgttcaacaagtggttgatgcgattttggctgccgatgtggttgtcttaggacccggcagtttgtttaccagtattttaccgaatctaatgattaaaaacttaggtgcggcagtcaagcaaactaaggcggaagtgatttacatttgtaatatcatgacgcaaaaaggggaaacggaacactttaccgatgccgatcacgtccgcgtgttgaatgatcatcttggtcagaacttcgtggacacggttttggttaataccgcacaagtccctgaaaactatttggatcatcaaaagtacgacgaaattctctggccggttgaacatgactttgatggcttacgaggattgggttgtcgagtgatttccgataactttttgaagttgaaagatcatggtgtgttccataatggacaaaaagtagcgagtgaaattatgaatcttgctttccaggtcaatacagctaagcgaggtgaataatcgtggcctcatatgcaagtgaagtgaagaaagaactgacgcaacttgaagtgcatcctgaacatgcacgagcggaattagccgctttaattcggatgaatgggtcactgagcttgatgaatcaccaatttgttttaaacgttcaaactgagaatccggcgattgctcgccggatttatagtttattgaaacaaaattatcaagttgaatccgaattactagtacgtcgcaaaatgaagttaaaaaagaataatcaatacatcgtgcgcttaaagtatgataccaataccgttttaaaagaccttgatattgttgaggaggacggttttaccattcatacaaaggtgtcagaagatgtcattaatgaagatcagcgcgtccgttcttatttgcggggcgcttttctagccggtggctcagtgaataatcctgaaacaagccggtaccatctggagatctattcattgtacgaagagcataatcaagatattgcgcgcatgatgaatcgttttggcttaaatgccaaaacgactttccgacggagtgggtacatcacttatctgaaagaggctgaaaaaattgctgattttctacaagtaattggtgctaccaacgcgatgttgaagtttgaagacattcggattgtgcgggatatgcgtaattcggttaatcgcttagtcaattgtgaaaccgcaaatatgaataagacaattgatgctgctacaaaacaaatcgaaaatatcgaatacttgcgcgacaccgtcggattagataatttaccggcgaagttgcgtgagattgcgctactccgtttggaatttccagatattacgttgaaggaacttggggaaaaaatgccgagtggggcaatttcgaagtcggggattaatcaccggctcagaaaattgaatcaacttgccgaagcccaccaacaggggaatggataaggggcaaaataaatcggtagtgtacaatatttgacttgtacaatataattaagtacaataactgaaggacattttatggaggaaaattatatggttaaaccagtattattagatgaacaactctgtttttcgatttaccgcgcacaaaaggcttacaatcatttctacggtaaggtattaaaaccttacggattaacatatccacaattcatcgcaatgcttgcattgtgggaacatggcaagatgtcagtgaaagaattagggcaccatttagaacttgatagtgggacactaacaccgcttttgaaacgcttagaagctgatggttgggtaagccggaatcgtgcatcagacgatgaacgccgagttgacgttaccttaactgaaaaagcagaaagtcaaaaagaagaaatctacgaacgggttggtgcttgcacaaactatctcgatttctcaagcgataagtatcatgaattacgtcaagaaatgaatgaagttgaacatcatttgaatgcgattcaaatggataatgcacgtttttcataaaatgacggataaagggttccaaaagatttgatggtaaattgaattttttggaaccctttatcgtacatacaaaaacaggtgccccgagggggggcacctgttttttattttagtagttgacttaagtcagtcatatcaattgattcatcaaagatatggtcaccaataatgatggtcgggacgaatttaatattggcacgatcggcttcagcaataattgcggctaaattttctgcattatcttgtggcgttaatttgagattttgatcgatgtattttttaaattcatctggtgtcagatcattacgccatgttttttgatgcgtaaacaagaatgatagtgtttgcagcactatttcgggttgatcaaaaggtaaataggtatgggctaaattccccagttgtagatcctctttatccttaccaaaaggtttgataatacgttttagccgaccagctttgactgcttcagtcatcgtttcttcggattttaaaaaccacttgcggcaataaggacaagcggcgttgataaattcaattgatgttaatggtgcatctggctgaccaattgtaataccgccggtggttgtcacattctcgcttttaatcacactaatatccatggaagaccctcctttaagatactgccagtataacaaatttggtataaaaaaagggctagatcaacttgatctagcccttttttttactaatcctcagaagagaaccggtttattatctactctattttggttggttgaccataatatcgtcaatcaaaccgtaatcttttgcttcttgcgctgtcatgtagttatcacgatcagtgtcagcttgtaatttttcgaaggtttggcctgagttgtctgccaaaatttggtttaaacgtttccgagtcttcaaaatttcgcgcgctgcgatttcaatttcagtttgttggccttgtgcaccacctaaaggttggtgaatcaagacagttgagttaggcaatgcaaaacgtttgccctttgtcccagctgaaagtaaaacactggccatagaagcagccatccccattgcgattgtttggacatcagacttgatgaagttcatcgtatccatgatggctaaccctgcggtcacagaaccaccaggtgagttaatgtagattgagatgtccttatctgaatcttgcgcgtccaagaataataattgcgcaatgattgtgttagccatttggtcgttcacttcaccagataacatgataatccggtcttttagtaaacgagagtaaatatcgtaagcacgttcgccacgagatgtttgttcgataactgtcggtactaacattgaattgcctccttatataagccagagtagaatcactctgtagtctataaattgaattttacagcaaaggtcaattttggtcaaatagaaagcctcttttcagaaagattatggtcattttgtgttcgaactgaaaatatggtatacttaggaaagttaatcagcacttatcactgtagtatcaagtattatttgaagactttaatcaactggagtaaccatggagttacaagtagtgtaaagaggcggcttacgctgtttaaacgagaagatatttagaaacacaagaatttagacataattgaattaacccaaaaataaaagcgacgtgaatcacacgtcatctccactagccattcgatgctagtgtgcgtagccaattagtgactggctacctgacattatgtaagaatttaatatgcgaaattaattagaaggccacctaggaataggtggcctttgtcaatggtttaaagattgagttgttcatgaggaggactcaatcttttttaggttatatttgtaagcgctattgtcaaaatgataatcgcgtgctattatatgaaattgaaccggttcaattctattcaataaagggagaaatgactgtgaaattcgtagataaactgtcagaaaagatgttgccgtttgtttctaaactcaataattagcggcatctaattgcaattcgggatagcttcattgtgacaatgccacttgttatggcggcctcgcttatggttttattaaatgcgctaattttctcaaacgccgctgttcaaaagattgttgatttaagcggattagctgatctagcaacaattgtgaataatgggacgatgagtattttatcaattgtggtctgttataacatcggtgctaatttagcaacgcattatgttcgctctgggaaagtgaacgatcctgcatttagtgcagttcatgctggtattttaagtttggcaacaatgtttattttgatgcctgtgacgagttccgtcactttagcaaatgggaaaacggcggaagcaacaggcgttttcttgcaaagtttaacctcgtcatcaggacttgcaacagcgatgttagaggcattgattagtacggagttattcattcgttttacaaagtttgaaaaaatacgaatcaagatgccagaaggcgtgccaccagcagttgcaacctcgtttaattcattagtcccagaagtcttggttgttttgatttttgctatttttgtatttattttaaatgtgacaaccgggttgaacgtccctcaattaatcgaccttgcgattcaaacgccactaaaatcgtttgtattatctgtaccaggtacgttattcttacaattcttctcagatttcttatgggtctttgggatgcatggttctagcattttagcaccagttcgccaagcaccattgctacaagccattcaagaaaatatggcggccttttcagcaggacatgcgattccaaatattattacagaaccttttacaaatgcgttcggcttgattggtgggggcggttgtatcttaccgttagtgattgccatcttatgggcttcacggcggaaagatcaacggcaagttgctaaattagggttaacaacttgtttcttcaatattacagaacctgttatgttcgggttaccagttgttatgaacccaatcttcatgattccatgtgccatcattccatcaatcaatttagtgattgcttattttgcaacaagcttaggtttgattagtaaaacggtagcggctgcaccatggattacaccgcctgttatttaatctttcttggcaactggcggtgattaccgagcagcgattttaaccatcttattaattggtttagatgtctttttattcttaccatttgtcattgcaagtaacaaagtattaactgaggaatgaggtttttgaaatgcagtatccatatcaagacgcagcgctgaccactcgtgagcgggtcactgatttactttcacgcatgagtacgcaggaaaaaattggtcaagtgaatcaacatctttatggatgggaaactttcgaagattctcagtcattaacgtttacagaaaaattcaaggcgcatgttgaatggggcggcggtgtcggtgcactttatggtttatttcgcgcagatccatggtcaaaagtgaactttgaaaatggcgttcgtgcacaggatagttggcgagttgctaataaagttcaagaatatgtcatggcgcattcacgctgggggattccagcattaattgttgaagaatgtcctcatggccatcaagggcttgaaggaatctcgtatccaactaatattggccgcggcaatatgtttaatacgcggttaatgcagcaatcatcgcatttgatggcacaagaactagcgcttaaaggcgttaacctagcgcttgtttcgacgcttgatttggtcaaagatccacgttggggccgttcagaagaatgttttggtgaagatcccattttagcggcgcgaatgagtgaagccgttgtggcgggttttcaaggggatttaattcaaagtgatgttgctttcttagaccaacctgctaaaccgcgaacgactgatgccattggtgttgtattgaaacactgtattgcgcaaggtgaagcattgggtggccataattcaggcaccgtcacaattggccaacgtgaattttcagacgtctatgaaccccttttgagtagtgtcaagaatgcggcaggtgtgatggctgcttataacgatgtggatggggtaccgtgtcatatcaatcagccgttgttgactcaagatttacgggatgtaaatgggtttcaagggattgtgatggcagatggtgttgcgcttgatcggttatcaggaatctttgaaacacaaccagaagctgcggcggcagccttaaatgcaggtgtcgatctaagtttatgggatcagacattcctaacgcttgatcaagccattgaaaatggcctagtagacgaagctgccttagataatgctgctggccgagtactagcgttgaaattcctgttgggtctgtttgaacaaccctatgtacaagccccgaatgcgcaattgacggccttgcttgaaaaatctgatgcgctgaatctgcaagtggcacgtgaaagcatgacgcttgttaagaacaatgggcttttaccaatccggaatcagccgcaaaagattgcggtgattggccccaatgctgatgaattatataatctcttggggaattatacagcagcacaaagttcagcgcgtcaagcgcaaacaatttatcaagcgattcaagaaatgtttcccgagtcggaagtcgtgtatgcattaggctgtgaggtgcgtaattcaattcatcaagaagaggcaattgccaaagtagttgagcttgcgcgcgatgccgatttaatcatccctgtattaggtggttccagtgcacgtaattttgatatggccttcctaagtaacggggcagtgagttcaaaaggcatcaacatggattctggtgaaaatgttgatgtcgcatcacttagtctgtgggccaacaagaagtgctgctcaagcaattgaaagcactaggcaagccaattgcatgtgtcatggtgcaaggccggccatacgatttaacactggtaaatgaacttgcagatgctgtattgattgcttggtttcctggtcaacaaggtggtcgcgtaattgctgaaactttagtgggacttaataatccaagtggtaagttgagtgtgtcttacccgcgcaatacccagcaactaccggtttactactatcaacgcgatgctgctaaacaagatgattactatgatgaggttggccaaccgttatatccatttggttacggacttagttacgaccaatttgattatcgacaattagcggttaagcaaatggttgacaaactagttgtaactgttaaagtaaaaaataacggacagtttgtaggtcaagaaagtagtttattatttgtcaaattaactggtggagcagttattcaacgaatgaagctgttaaaagctttccaaaagaatgccttccaaccaggtgaagaaaagagcattactttcgaactacctgctgctgattttaattacatggatattgataatcaggtgaaacgtgcgcaagcagcgactattatggttgctgatttagcggagaaaatcactttatcgatataagcggggaataagaatgtcatctgttagagaagtcgctgaattggccggagtctcggtcggaactgtttcacggtatctgaatgggcaacagcttaaagcagctaatcaagccaagattgcagcggccattgagcaactcgattacaaacaaaatattatcgctaaaggattgaagaacaatcaaagtttttcaattggtttattgatgaatagtatttcaagtcgatttggcgcggaagttgtttctggaatagaacaacgcgttgagcaacaagggtatagtttattattgagtggttttagtgaccaaccagcgttaattgatcaaaaaattgattatttaatggcgcattcgattgatggtttaattgttttcttagcaggtgaagaatggcaaggaatggaacgactagcggcacttgatattccggttgtgacgattaataacccaaatcagctacgcaatgttgattcgattttattagatgatcgcgcaagtgtggcacaagtgatgcaacaaattattgatctcggacaccagaatattgggatgattgccgctaatcaggatgattatgttgcccgtgaacgactggcaggtgctaaacagacgatggcagcttatccagacagacagttacatgtttttgaaggtgactattctcggactagcgggtaccgcggtgcccaagcattattagccgaaggtattacagctttatttgtcagcaatgatagtatggcctttggtgcgctcacttatttatcagaaaatggtattcggattggccaagatttactatttggtcactatgattatgccgatgaacatcaatttggacagttgccaatcctatcgattcaaccgccaacagaagcgattggattggcagctgctaagttgttattagatcggctccaaaataagactcagtcagatggtcaaacgattttaatgcatcatgaaatcaatggtctaaactgaatcatcgaaaagggcgagtagaataatctacttgtcttttttgagtttaatccttaggttattaatttacccgtccccgataatggggtacacttgtggtgtacattattttgcatgattattgaggagggcttggcgtggcacaaaaaatgattttggatttagatactgggattgatgatgcgttagcaattgcttatgcattgggatcatcagaagtcgatttaatcgggattacctcagaatacggcaacgttttgactgaacgaagcgttgtgaatagtcaacaaattttacatttattaggtcatccagacattccagtttatttaggggctgggcattcgacgacgacgcatgattttagcgtcttaccaattagtgcggaaattcatggtcaagacggcgttggtgagattcatctgacagagccccatccggaaatggcaactgaatcagccgttgattttatattacgtgcttgtcaggcgtatggggctgacttgagcatcgtggcaactggcccgatgacgaatttagcgttagcgattcaaaaagatttaccaactttgaagaaagttggtcaaatcgtgattatgggtggcgccttaacagtttgtggtaatgtgtctccatttgctgaagctaatatcagtcaagaccctgaagcggcggacttactctttaagagtggtttgccggtgacgatggtgggccttgatgtcacgttgcgcacactttttacacgcaccgatacggcagaatggcgcgcactcggtacaccagcagccaaagcttatgccgatatggttgattactatatcaaagcctatgaagtcacttctccccatttacacggctgtgccttacatgaccccttagcagtcgctgttgcaatcgatcctagcttagtcacgactttcccattgaacttgaagactgagatagaaggcccgtcacgtggacgaacaattggggataatgcccgcctagatgatccagcaacgcggacggcggtttgtgtacaagttgatacgccgcgtttcttaactgaatttaaatcaagaattggacaattattagcgcagtagaatgagccatatagaatttcaaaaaagagctacgacaaaagtcaattttttgtcgtggctctttttttattgtacaggcgactagcaagaataagtcggctaacatgtagtgtgaatcatgattgctgagccagtcaattccttgattggcgatggcaaaagctttttgaaagtggtgatcttgatagagtgccagactatacaggtagaataagatattaatgttctcgtcatagtgcgtgaaccgccctgcattcacaattgcgaggacgtgttcgaagtcagtttgattagtatggggcgtactcttaataaagctgatactactgagaatcaaaatctcagtaggcgttaaaacttgttggcgcggtgtaaacgtatagtcgagtgccatttgtagttcccgtaaactatccgtggttgtatgaagttcttggaatactgcgatgccatgatagtagtagtaggtctgtaaatcggtcgccagttcaaggtgttcggccaagccagtcgtatccaaataatctaacataccgcgataatcgtgtgcattgcacagttgtttaatttgttgattgaattcgggttgttgatcaatttcgggataatgacttaacagcgcttgttctaacggcatattaagccgttcgcagagttttgctaacaaaatggcgtttggaatataagtgccgttttcaatatgactaatcatcggttgcgaacaaatatcctgggctaattgatgttgggacaagccttgcgcacgacgaaccgtagcgagtttacgccccatggtcgcggcaagtagattatcgggaatagctggcactactaacacctcacttcatatgattgctttaaatttaacatgcaattttcaaaaagaaaaggagctggactgcatgccagtattgattattatattagggtttgcgtttattttccaaaagccattagtgtctgcagttaccattgtgtttggcgcgctattgggtctttggttactcagaggaataatcgtcttgatgatgttgataacacttggccattattggcgtcagaaaaattaaaaaagaccgctgaataagcggtctttttgattgcttagaattgatagtccgggtcaataatcaaaacgggtttgattgtttcacctttaatagaggcttcgttggcagtgttgatgtcttcgaattgataaaatttttcggttttatcaaaggggaacatgccttgacggtagaattcgattaaacgagggacgtcgatttgcggaatggagtcacccatgttgacgccgacgacggatttgtcgttgacacataagtcgttccaagtatcaagatcgatgtggtttggggttacggcaattgttgctgacaccccaccttggcaaagcgccttaattgaatcttccatgactggtgtaatccccgtggtatcgacacagaagttcacgccgcgcccatttgtgagggcttggattgctgcgacaacgtcgtctgtttgacgactgttaatcgtatcggttgcaccgagttctttagcgagtgcgagccggtcgtcgatgatatcgacagcgatcactttcgtacagcccgaaattttaccggccatcatggctgcgagtccaacagcaccagtcccgaagacggcgattgtgtcgccaggttttggttttaaagtatttaaaacagtgccactaccggtcacgtatccacaaccgagtggtccgagtttgcgtaagtctaaatcgtcagggactttaaccgcatttcgttcgcggacaacggttgtggttgtgaatgaagattgatcgaacatatcggcaacgtgatggtcattttcagtaaagtgggaactaccatcagggcgcacgccggataagttattttctgcgtagttgaggcattgtgttggaacgcctttgagacagttttcacagatgccacatgcgtagaatgagagaacgacatggtcgccaacttttaaactttgaacgtttgaaccgactttttcaataattccggaaccttcgtggccgaggacgattggatagccaataatggcgtcgcctttacgaagcgcttcgtctgagtgacaaatcccactagccaccatgtggacttgaacgtcgtctgggtggagtggtgcgagttcgatgttatctttaatgacaaatggtgcgccttgttgttcaacaacagctgctttaattttcatgcaatgatcttctaacttaattatttaattcacaagattattatagcattgttgaaatcgttttcaattaaaaattgacattggcgctaaaattgccaaccatgttgttctaagtcccactggcgcttaggcagaccactcacatacgggttaccagcgacataatagcgataaggaagttgaccactcgctgctttataattgaccccgattcgtggcgcggtgacaattgatttggggtggcgacgatgcgctaaatcaatcattaaaggggcgtccgccacattttgaaaagtcagttgtttatcgtgaatgccgagggcgcccattaatttaccggggccgttagtcagttcgacgccaggtttcgggcgattgaggcgcatttgttcaatgccgtgggtcggttcgatggcgcgaatcaagacgccttgtggttgatccactgcttgggtcacgatatcaaatagaaagaaaccgcgtaattgatagatataaattgtaccaggctcatgatagagcggctcgctaaaggatgtgcggcgcccattgtaagcatgcgcggcagtgtcatcggtgccgacataggcttctgcttccacaatgaggccgccaagtgtgccttggtggctggtataaagcaagtgagttcctaataaatcttgcgcgatggcttgggtagaccggttcgtaaaaaatgatggtgctgctggttggcttggtgtcataattaaaacctccgagttaaaacgaatcagctttattttaacaccaaagacatgacatttgtcatctgtaagtcatgacaaaatcgtctaacgacaaaacggaatcacttctatactagggttattaaatgaggtgatgacaatgattgaaattaaacaagtgacaatgcaattcgaacaacaagttgttttaaatcaggtagacttaagtgttcaacctggtgagattgttggcttagtgggtgcaaacggcgccggcaagtcaacattgattaatttaattttaggccgactccaaccaacggctggcgagattcggattttaggtcagaagccaacggagaaagaacatttcaacttattgggtgcgatgatgcaaggaaatgtccgattggctcgggtcagtgtcatcgaagaattagaattggtttgcagttattatcaacagccacggtcagtcgctgaattattaatgctagctgatttgaaggcacagactcataagatggtgtcccaactttcaggtggtcaattacgccgcctctcctttgctttagccatggcaggcaatccggatttgctattcttggatgaaccgaccgttggaatggatgttggcagccgacaaaaattctggcagcaaattgaacagttaaaagaagccggcaagacgattattgtcacgtcgcattatttagaggaaattgaacacattgcaacccggattttattattgaaagatggccagttccaattcgatggtgacttggcaacattacaacaacaatttaaaggaacgcagattcgctttacgactgatttaccagcagctacttttgcaaaatggccaggcgtgatccgcgtgacgaagactggggccaaggtgctgttgcaagttaccaagagcgatccgatcttaagtcaattagcaccaatgatggggatccaggttcatgatgtgcaggttcaagcaagctcattaaatgaaatttatagcgaaatgatggaggactaaaaaatgcaaacaatgatggtacaaacaaaaatagactttaaacgcgcatattggcgtaatccacgctttgttattttttcactcttaatgccgattgcgttttatctcttgtttacgaaagtaatgaaacagggtgtgatgaatgcagcattcaatcgacaatacatggtcagtatggcgacctatagtttagttctcagcaacacgtttactttatcgacattactttataatgacgcacgggatggcttggtttccttaatcgatttatcaccaaccagtcatcggacttattatggggctaagttgttgaacttaggcttaatcaatgctttaacgatcggcgtcattttcatagttgctgggattagtaatcaaattcatttagtgtggtccagttggttattaacggcgggctggttgtggtttgccagcatccccctttgtttaattgggattagcatttcatttttaacagatgaaaatcagattcaactggtgtctagtttgttagctttccccttagcaattttagggggattatggtggccaacagaaataatgcccaaaacagctcgcgtgattggcaagcatttgccggtttatccgattaatcatattggccaagcgctgattgcgcatcaacccgcacacttgggtgaatatggcatcacgttgctctgggctgggttattactggcaattgtcgtatacttaaaccatcataaaagaggagcgatgcatgcatgaatttttttaaacgctacattgccatgccaccccaatatggcttatttccatatgtttggttgattttcttgctctttccaattggttatgcgtttccgtatcaaacggttaagcagcaagcgattatgggcttgattctgattttcttggtggcttatcgcaatgggtatgtcgcatcgcggtatcgcgcattctggattatcttacaaatggtgaccagtgcgattttagcagtcattatccaggcgttttatctgaatatttatactgcctgggtgtttggttcgattcccatgcgccgccgaagtttctggcgctattactacgcttatctgttgtcactaatcataccagcggtcaccctatattggtattatggtggtcatatgggacgcgatgatctgattggcttaatggtgtacggcttgttctgcatcttttcaccatttgcggctagctcgattcagcgtttcaatcggaaaaatcgccaattaacgcagaccaatcagcgattaaccgatatgattaagcagaacgaacggcaacgaattgcacgggatttacacgataatttaggtcagtcattttcaatgattacgctaaaagcggaatatgcacgtaaattattggcgaaaaaaccggatgcggtacccgaacaactactcgagattgaacaagcctcccgtcagaatttaaaaatggtgcgtgagattgtcgctggtttacgccaagtgaccgttgctgaggaattgatcaatcaagaacggaatctcagcgttgcaggcattttattgctgactaaaaatgaagaccaacttgaggggattccacaacaaaatcaacaagtgcttgcgcaatgtttacatgaagccgtgaccaatataattcgctacagtcaggcaacggagtgttacgtggtttttaatcgaaccgcgacgacttttcagatgcagattgaagataatggtcgcggattgaaaagcgaagatcaatataagagtcatgggattgtgggcatgcgcgaacggttagaaacgattgatggagagttgatggtcgatggtcgccggggcacacagttgacgatgacggtgccacttaagatggagggaagggcatgattaaactttatttggcagaagaccagcaactattgaataccgctttagcgggcattctggatttagaggatgatttgacgatggccggaaccgccgtcaatggacaagtcgcacttgatcagattgaaaccctccaaccagatgttgttttgttagatattgagatgccgggcatgacagggcttgagattgcgcaccaactacatacgcgtcagccacagattaaggtgattattctgacgacttttgcccaaccgagttatttcaagcaggctatcagcgccgaagtggcagggtatctattaaaagatggcccgagtgatgacttgattgtggcgattcattcggtcatgaagggcaaagttgtttatgcgccagaattagttgttgggctgacaacgcaaacgaagaatccactgtctgagcgggaaacggaagtattgcgtgcgattgctaatgggttgagtacgaaacaagccgccgaatcattatttttatcggatggaacggttcgcaattacatgtcgacgattttaagcaaattggatgcaagcaaccgcgttgaagcaattcagattgcacggcataatggctggctgtaagaggcagtaaaattgcctctatcatgattgttctctatgatgaaagcaaacaaggaggacgaaacaatggcattagcaaatttgcataaatgggcgtttttctatttttcaccagacttttcacctgaataaaatacggtgattaaccgtaatccaatgggaacgtgcgagatgattaccgtcgggttcgatccacgtgctaaagaagatggttcaattattgaagtcgctaagcaattgaaggcaggaggcattcaatttattgaactctgtgggggcttcggaccaacctggacgactaaaattaacgaagcactagacttcgccatcccagtcggagcagtcatgtatggtccagaattcagaaaacaattgtttgaaataatgaactaaagagtgcgtcaaaagcgggtatactgcgagcattagcctaacaagacgaatgattgctgaaagcaatcatttgacttgtgtagctaagcacagcagtatgcttttgaaagcacgtttcgaataagagtgcgttcaaaccgtttatgttctgaggattagcaaaattagacgaaaaagcggcgaagccgcttatttggctaattaggctaaacgcaggaacatggtttgaaaagcacgtttagaatgtgccgtcagtcgagaattccgtctaattaatattgtaggcctttgtaaaagttaattttacaaaggcctctttttttaggcttattatttaacttttgactgatgatttggtatgctctacttattaaatgtaaggaggcgtgtcatgcaaagagggcggcagttcttaaaacttagtgttagtgcaatttttatattcggggtgttcttattatgccaagtttcgggggtgcaagccaaacaggttcttcagctcggcgcgcaagcaccactagataccattgatatctcgacttcaacgggatatggtcaaacggggaatatttatgaaagtttattccggcttggtgagaacggtaaaattgaaccaggcttagcgaaatcgagttcagtttcagctgatggtaagacgtggacatttaaactgcgtaatgccaagttcagtaatggtgacccgattcgggcgcaagattttgtctattcatggcaacggacattgaaaccagaaaccaaatcaccttatacaaaccttttcagtaatatccaaaatgcaccagcgattgcaaaaggtgagctggcaccagaccaactcggcatacgggcagtggatgagcacacgttggaagtcacattatccacacctgtggcctacatgaaaaccttgatggcttatccattatttgccccacaggatcaaaaagtggttgaaaaatatggtaagaagtatgcgacgaatgcgaaatacatggtgtactctggtccgtttaagttagttaactggaatgggacgagtgagaagtggcaatttgtgaagaacaatcaatattgggatcgcaaaaaggtaaaattagaccaagtcaactataccgtgttagaaaataccagcaccgcgctttatctttatcaggaaaagaaactggatttaacccagttggataatcaacaaattgataattatcgggatgataaagcattccatagatatccttatgcgttgacgaactacattaaatataacttcaaatcagcagatgaacagaaaaaagcacttttgaataaccaagactttagattggcgatttcgttagcgattaatcgtaagacgttgaataaccggctattcggttcgaagaaaaacgatattactggtttcgtgccagtgggcttagccgactcccctaagaaggtggactttgctaaatcacaagccgtgccagataccgtggattacaatcaaaaattagcgcttaaacattggcatgaagcattgaaagcgactggtcaaaagaaagttgccctcaccttaacgcttaattccgatgatgccaacgcgtcatatgttggtcaatatctcaaaggtcaacttgaaaaagtcttaccaggcttcaagttgacattaaagaccgtgccaagccaagtttcagcgagtcgtgataaaaaaggcgactatgatttattactcgcaggttggggggcagatttcaaagacccaatttcgtttttagaaatcatgttaccaggggctgcaagtaataccggcggcttcgacaatccagaatacaaagctgcccttgaccgcgcaatgaatgccgatgcgaacgatcctgacaaacgttgggcggacctcgtgacggctgcgcaagtcatgaataaagtccaagggattacaccactctatcaaaatgatacggcatacttgaagaatccaaaggtcaaagacgttgtgcataacacagctggcgcacaatggagctacaagacggcttatattaaatagcgtgtgaataatcagccagttatagcctgaggattaacaagaaaggcgccagtccaaaatctattttttggctggcgccttttttgtataaacaaatcattatggttctgaattttgctgtgctaaagtaagggtattcaataaaagaaagagggaccttaaatggcaaaacaatatgaaacaacgatgattaatgaagggggccgcaatggcttcgtttattcacccgatcaagcaaagaaatatgtaatcaagtcaccagggacagacccatcagggaagagtacaaatccagagcaactatttgcagccggctatagttcttgctttaacagtgccttagatgttgtccttaaccaagaacatattaaaggcgaacccacgattaaggcgactgtttccctttatagtgatggccctgccaattattatattggtgttgatctttttggtcacatcgaaggtttatcagaagaagaaacaatgaagtatctcaaaaaagcagacgaaatttgcccatactcaaaggcaactcgtggcaatattgatgtcacgattaatgtgatgtaaatcattcaaaaaggaatcagcgactgctgattccttttttggtgattaagctttcaatgaatgtggtttgccttcttgtttgaggacggattgcacggctgggtcttgtcgcatgtgttgatcaaaacgatccagattagggaagtcagccaatgaaaatgcgagtcgttgacaccaattcgtcatgacaaatagataggcatctggtgcactgaactattagcaactaagaaggactggtccgctaacgctttttcaacataagcaatccgtgggaaaacccgtgaatggactaaatcttggctttcgggtgtattagggagccaattacctttacgaaatggtgagatgaagttcttatgcaattcggtggtgatgtaattcaaccacatccgttgttgccagtattgttcagtggcatagtcggccattagtggcagcggactttgttgactgatgtattccaaaataacggcgcattcagtcatgaaatcgcccgattcagtttgtaaggctgggacgtaattcttctgattgagctgatgatagtcaccaagtgatgtggtatgggtatctaagttaactggcgtaacggtgatgaattgcaatgatggtggattataatggaattgacgaaagatactgtaattgcttctttgaaagcgttataataacgttgattaaagattgggggggtcagtgatgagtacgaaagactattttaaattttttacgagcaccactttgacgggcgataacaatcgtgcgtatttggtgacagtgacgcgggcaatcgattctgagcaattgaaaagcgtgctggggaatactgtgacttattttaatcagtacggtgacggctttccgtttacttcgccgtttacgattgaccagttgaatccaatcgtcactgaacaaactgatttacaaccgactgaatttacgattattaaccatgggattggcaatattcttgcctaaaaaagggattgagacaaacgttgtgtttgtctcaatcccttttctgatggtcaaatctaatcgtctaagcgtgctcgggaaatcccagacttccgtcacactcttttaatttctagcatatttatgttcatcggcatagctgaaaaaatcggctttggcagtataatcaccgcgataaacgccgttccaaccagcacgttggccaaacgcgcctaaatcaatcaataggtgttcttcatccttggtgagatgaatcttgccaaagccaacactatagatgtaattggccaggcgattgacgagtgcctcgggattcttaaccgtatcaattttgaggtagacctgtagtaaaacatcggtaatatctaacaatgcatttgatttatccggatgcgccattagactgttgtaaagtgtatggatgttttcttttgcaattgattgacttatcatttaaacccctccaaataacaataattcacactagttatagttcctttttagttatttgtcaatgatgtagataagcgttatgattgtctcaacagttgattaagagtaagggacgattgaatatgaaatggtatgcagatggacaggaacgtgggcatcaagcaattacaatgattaaggcattattaaacgacttgaaacaagatgaccaaacggcaccattacaatcagttttgcatagttatcaaactgaaattgaagcacaaacgacagcagtaccattaattttgagccgaatgaacatcgcaattgcgaatgtgattcaaaaagaaggcttggatctatcagccagtcaacaagctaagttaaaagaaatgacggcattatcgatgattagatatggttattagtttagtaggggatccagaaagaaattgttgaagatcggaacgttatgccatcggattagcttttttatagttttattgatattaatgatgttcgtccatatggaagcccttttcgggttgagtacaaattatatgacgacgcatgaaccagcattgattgctgttaattttgggatgtggctaataatagtctttttgtttactagaatttatatgagacaaccaaaacctgactggcaaaatgcgcaaagagagccgatgctaaagaaagttgtactgattttagtgatgtttggtattgtgctagtgattgactggatcgataaacgttggaacccattagcgctgccggagaatcaagtctatattaatgagctaatgaaggctgttccgattttgacgacactcagcaatgatttgtttgcaccaacactagaagaattattatttctggtattttctttaatctcttttttattaaaaaaacgaatgcgatacggtgatgaaaattattgtatcagggcttgcttttgggtgcgcgcatcagctgaaaattgactataattggcttatttattgttcatttggatggatattgggcagtacctatttttggacgaaggatattagatgttcaatagtgctccatatgctcgttaatctatttttaatagcacattgtagataaaatgatttaaatgaacgattataatgacagctaaaaagttaacgactgatttggtcatgttgaacacctcatcattttatttcatggctactctagtgctatcttgctggttaaacaactagaatgagaacttaataaccaccaaatgaaagcgttctaatttaaggccgttttgttttgacaatgcttgataagtggcttacatttaattgtgaaggatagcacaacctatccgcagacatttgtgtcaattcaaatggaagaggtggccagaatggcaacgaatcaattagtattaaaaaccgcagacatttgcgatatccgggatattgaggaagcacgggcaatcattaaaccgtatattcgcgaaacacctttaattcaatcgatgttcttgagtcgtaatgtggcgcacggtcatgtctatttgaaattggaaaatatgcagctgacgggatcgtttaaattccgtggtgcgaacaataaaattaaccatttaacgccagagcaacgggctaaaggcatcattacagcttcagccggcaatcatgcgcaaggggttgcattgaccgcgaagttattagggattgatgcgaccgttgtgatgccagaagaagcaccgcttgctaagcaacaagcgaccgccggttatggggcgaacgttgttttacatggtgcgacttttaatgattcgcggttgtacatggagcagttagcagccgaaaagggcttaacaattgtccatccctacgacgatcgcgaagtcatggccggccaagggacaatcggccttgagattttggatgcgatttggaatgttgatacggtgattgtaccggttggcggtggtggcttaatctccggcattgcgacggctttgaaatcctttaacccctcaattcacatcattggggttcaatcggaaaacgtgcacgggatgacggcttcatttgaagcaggcacaatcaccagtcatcatgcggacttcacgctagccgatgggacagacgttgcgattccaggtgaactgactttcccagtgattcaaaatctagtcgatgaaatgattttagtttccgaaaaagaaatcgcaactgcgatgaaggatctcatgcaacggactaagattgtcacagaaggcgctggtgcattaccaacggcagcactgctgagtggtaaaattgatcctcaatggttaacagataaaaatattgtggctttagtttcaggcgggaatgttgatttaacccgcgtttcgggtattattgaccaactcttccacccagctgatacaagcaaaggggttgttggataattaaaaagccggcatccgtctaaaaacggatgtcggcttatttttgtgctgcaagaaaggctggaccatgatcgtcgattagggcgtgaaattcttggcagtctttaacagtcatttggggtaagagctgtggttcaataacctgttgcacctttaaatagtggaggtcttttaaagaacagtgctctaggtgagcaattaagcggcgggcatataaatcagcgataaagactgggcggtcgaagacatataataaaatgacatcggctgtttccggaccaatgcctttgatagcaagtaactggcgccgcaggtcagtggtggttgtcatctgattgagcgtgtctaagtcaaaatcaactgtcgctaaaaatcgaaacagccctttaattgtcctgcttttagcgttattgaagccgctgggtttaatagccaacataagggcttcatccgaaagagaaagcagattgtttggctcgaagtgcgtacttgatcgtagattggcgagcgagcggtcaacattttgccagtttgtattttgaactagaaccgcgccaaccattgtttcccaatgggaatcagaagaccaccagtgttgcggcccatattgccgatacattgtttgaaagagttggtagtaatcaattttaccgttcatgaaaaatgtctccttaacataaaaaggcgctacttcacctttggcagtcacttattgtcaatttgcttggtgcgcagttgtagcagtttggaagttgtggctaacgagatggtggtcaaaatgatgaaaaaagtggttgaaagtaagaaacgcggcatctgcgccccagaaaattttaaaataatcgtggtgagggtactaaaagtggtgaggatgtttaaaatcatgagtgaaatttcgtagttgcccgattgtttcgaaatgacgtggccagcgtataataagccaacgccgaacaatatatatgagaaatagaaaataccgaagaaaacgatgaaaatagttgatgattctttggcgtagacgagaatatcgttactggtaaagatgcgaatcaaagtatttagaatctgataggtgagataaagtgttgctagatagataaaagtggggaagttttgtttggtaaaggccatagcaatctccattgttttttattgtaaagcttgtcactattctagcatggaatttaagaatggtcagttgaaagtcatccgagaatgcgtttttatttgtaattaatatcatctgcgttatacttgggttgtgtaacatagaataaggagtgatcaatgtgaaaattatcgttgtcggttcatctcatggtggatttgaaactgttcaagaaagtttactcgattatccggatgcaaccatccaatggtacgaacaaggcgatttcctatcgttcttatcctgcgggatgcaactctatttagaagggaccgtcaaaaacgttaatgatgtcagttatgcgacaccagaaggcatgcgggcaaaaggggttgaagttaacctacaacaagcaatcaccgcgattaacgccgatcaacatacggtccaagtgaaggatttaaagaataatacaacgcgtgaagaaagttacgataagttagtcttgagtgtcggcgctgtgccatttgaattaccagtgccaggccgtgatttagagaatgtctacgcaatgcgtggccgtgattgggcgattaaattaaaggcgaagacagttgatccaaccgttaaaaatgttgtggtgatcggttctggttatattggcattgaagcggctgaagcatttgctaaagctggcaaacatgttacagttgttgatgtcttgccacgtctattaagtctctatctcgatcaagaatttacagatcaattaacggctgaaatgcaagcgcacaatatctatcctgcagttggtcaaggcgtcaaagaatatgtcggcgttgacggtaagctaactaaagttgtgaccgatcaagctgaatacgatgctgacttagtcatcgaagctgctgggattcggcctaacacaggctggttaaaagatacattacaactcgaccgcagcggccggattgaaatcaatgaattcttacaaacaagccaacccgatatttttgcagtcggggatgcaacggttgtgaaatacgcaccaactggcaaagaaatgccaattgctttagcaacgaatgcgcgtcgccaaggtcgctatgctgctaagaacttagtcaccgccaaccaaccggtacccgctgtttcaggttcatcagcattgagcgtcttcgattatcactttgcttcaactgggattaaagaaggaacggctgataaaatgggtgtgaagacccaatctgttttggtttctgaaacatatcgcccacacttcgtccctgaagcagaaaatccagtggtcgatttcaaattaacctttgatccagaaacacggcgtgtactcggtgcgcaaatcatgtctaaagctgacgtgacggcaaacatcaacgccatttcacttgccattcaaggtaagatgacaatcgatgatttagcatacgctgacttcttcttccaaccaggttttgaccgtccttggaacatcatgaacgtcgccgcccaaaaagcacaacgacttttagacaaataaagtgcaagcagctgtcaattgaagattgatggctgctttttgtgctgacatggttcgccaaataggcttgatgaagacggtgattgtcattggattcgtgtattcagctggtgtattgctcttaacggggcttacgcttggctattcaagtgtaagacgttggcttagaaagaatcgctaataaaaaaggattgggaatcgataaaaatatcgattcccaatccttttttactatattacccaataccgatcacataatatgcgagtttatcggcgtagtgtcgttggttattttgttgtttagcttgcttaaccgcggtgagattgtcggtgaccacgccgtctgtaccgaaatacatcatgcgttggacggcttgttgatcattgggtgtccagacaaagacggccttattttcctgatgtgcagcttgaatgaagtgactgttgacagttgtcatttcaacggcataaaaatcagcgttcgaaattggtgggccgataaaattaaaggggagaatgtagcccgtttgaatcttcggtgctgcctttttaacggcctcgacgatgtgccagtttaaggattgcaccatgtgaccgtgagcttcgatattggcctgatacttattcaggaaatgttgcaccaagccgggattatcggtggtgggtgtcttaatttcaatcagtagtttttgatgaagctgattggcgcgtgcaagatagtcatcaaatgaagcaattggtgcggattgccgatgttcatggacggtcattttagtcagttgcgccagtgttttagactgcggggtccctgagtgcccagtgagtggggcaagttggaagtcgtgaaagacgacgaattggtgatctttagtcaattgcacatccatttcaacataatcgggctttaatcgggtagtttttcgcagcgcactaatcgaattttggacgccgtctttttgcgaaacgccacggtgggaaatgcttagcggctgctgaatggttactgaatggagatagtcccaattataagtcccaacgccgattaaaacgcaatttgctacgaataataaccaacgaccactgagctgcacgcttaattttaaggttgcatagttgaacgtcggttgcacaaattgtgggtcggccaacaaataatcaatgacgatgaaaaagacggcgactgttgaaagcaccaagttgatgagcatagcagcttgcaacaaggtcatgatgaccacggcacttggcagtcccactgatgtgtgggtttcaatcaacgcttgtagttggatgagtaggaaaaaagtgagtcccgtaaagccaatcagtgcggcaccgattaagagtagacgccccagtaatgagccaattttttgatgtgtaaactgccaactactggtcaacgcttttttgaaagtcatctgctgaagaatgatgtttggtagggtgaagatcagccgtaagccgagatataataagcccaaatagacaagaatgaaaagtcccgcgacaattcgccgattcatgagaatataatccagaatgaatgccggtattttaaacttagtcaataaatcagaatgatagccaagcccgcccagcggtaaaattaaaagacaataatatagaaagaaaaagaacgtgccaattcgaaggtgcctgagttgcgcaaaagtcatcttcagcaatgcctgcaaagctagcggccgtttaatctgaataaagtacacacttaatagaagaaacgtgaattcgaagaaagccagcaataaaattagtagcgcaattcctacgagtgctaacagcgcaattggatgctgatgaataagcgctggcaagttgctcaacgcgagaaactggatctgattatgtaccagaatgaagtagctggctttactcaaaagcggtagacaaattaaaagcaaaaagccatgcatcaataacacactacgaaaataggcctgggactgctttaaaaaagtgaatgtacttgtaaataggattttaaaatactgcattgaatgggtgctcctcaattggactcgtaatgagataattgtacaacaaatatagaagcgtgtaatatcgattaatctttgtatttaatgaagagtttgttatagttattaagttaatagtatgaatgaaattgctaaagctatcttgtggaaataatgaccaaaaaatatttaagcgcgcgaactcggaccaaacatacatatgctttttataaagagcgacggaacaatccgcaatggcgcgacgattttattcaggttagatcgcaaagaagaaaagcattatttattcaaacgattgttatcctaatcataattgcaggaggtgcagtttatttttctaaagcaatgccaatgaaacgtgtggttgaacaatcagccactagttcaagcacaacagctagaactgaatcaacaaaggaaccatctgcagatccggcgattgcaattagacataatagtagcgatgaagaacaagtatcgattagtgaatctagtaatagctggatacaaaaatattaataaaaaatgcggaagtagttcagtggtagaacatcaccttgccatggtgggggtcgcgggttcgaatcccgtcttccgctttttttgtacccgtaataaaatagtttccgggaagtagctcagcttggtagagcactacgttcgggacgtaggggtcgcaagttcaaatcttgttttcccgactctcaaagacttgttgatgacaagtctttttttgtgcgtccaattgattagctactaaaagtcagtaaactttcattttgtactgataatcgttataataatagtcaacgttagtcaaagttaaacttttgacactgaaaaacgcagaagactaaatgaaggggctgatatgtttgcaaagtcagaacatctcggatattattgaagcctatctaaaaaagatactggctgacaatgaacaaatcgaaattagacgctccgaaattgctaagctttttaattgtgtgccgtcccaaattaactatgtgattaatacgcggttcactgagcagcgcggttatgtcgtgaatagtaaacgtggcggcggtggttatattcggatcgtcaaggttcaatttctcgatgatcgggactttttagaagcgttaattgaaaatgttgatacgcagatttcccaggcggacaccttagccattatccagaaactatatgatgaacaaattctttcgcaaaaggaaggcaatttgatactcgcggcaacgagtccacagacattagcggttaataataaacaattagaagagcagcttcgagcacagattctagttgcagtgttagaacgactacgatatgaaattaagtaaagagtgggggattatccatgaataatctatttacaccaagtgcaaaaaacgtcttaatgatggcacaagaacaagcaaagaaatttaatcaccatgcactaggaacggaacatctcctattagcaatcgtattagaaaatgagggaattgctgggactactttacgcgaattaggtgtcaattcgaccgatgtccttgaagaaattgaacgcttaaccggatatggcgatgctgtaatcgcttctggcattggcggttatttaccatattcgcccaaagccaaacaagtactcgatattgctcgggtcgaagcgcaacaagctaattcggttaaaattggcacagcacacctattattagcacttttacgtgatgatgatattatcgctgcgcggatcttattgaacttaggacttagtttagctaaaacacgccaactactacttcaaaagatgggtgtggatacagcaaccgctaaaaaacgggctaaagcagctaagaataatgccgatcaagctgggacaccaacgttgaaccaattagcgcgcgatttaacacaacttgctcgtgacaatcaaattgatccggtcgtgggtcgtgatgaagaagttcggcgacttgtgcagattttagcccggcgttcgaagaataatcccgtcttagttggtgaacctggtgtcggtaagacagcgattgctgaaggttttgcgcaacgcatcgtcaatggcgatgtgccaagtgacatgcagcaaaagcggctcatgatgctcgacatggggtcattggttgctgggacaaagtatcgtggtgaattcgaagatcgtttgaagaagattatcgatgaaatctatgcagatgggcaagtgattctctttattgatgaattacacaccctcattggtgcaggtggcgctgaaggggcaattgatgcttctaatctcttgaaaccagcattagcgcgtggtgaattacaattaattggtgcgacgactttagatgaatatcaaaagtacattgaaaaagatgcagctttagagcggcgattcgcgaccgtcacggtcaatgaaccaacgccagaagatgcggaacaaatcttaaagggattacgtccacgttatgaagctcatcatgggattgcaatttcagatgaagctttacatgaagcggttgtcttatcaaatcgctacatcacgaaccgattcttaccggataaggcaatcgatttaatggatgaagcgacggctaaagtgcgcttggatgctgttaaccagaagacaccgttggataaattagaacaaaaactacaaactttaaatgacgataaagaagccgctgttcgcgcgcaagattttgaaaaagcggcgacgattcatgagcaagaagtaaccactaaggccaagattgccaagttacaagctgccgaacaagaaaacggtgttcgcagtgacattcaagtgactgctgaagacatcgctcaagtggttgcgcaatggaccggtgtgcctgttactcagttgcaacgcaaagaaagcgaacgtctcatgcaacttgaaaaagtcttgcataaacgggttgttggccaagaagaagccatttctgccgtttcacgtgcgattcgtcgtgcgcgcagtggtttgaaagatccaaaacgaccaattggttcatttatgtttttaggcccaaccggggttggtaaaacagagttagccaaagcattggcggaagccatgtttggttctgaagacaacttgattcgggttgatatgtctgaatatatggaacgttacagcacgagccgtttagttggggcggcccctggctatgtcggctacgaagaaggcggccaattaacagaaaaggtccgcaataaaccatattccgtcattttatttgatgaagttgaaaaggcccaccctgatatcttcaatatcttgttgcaagtcttggatgacggctatttaaccgattcaaaaggacgtaaggttgatttccgtaatacgatcatgattatgacatcaaacttaggtgcgacagccttacgtgatgataaatccgttgggttcggggttaaagatgtaactgctgattataaagcaatgcaagggcgcattatggaagaattgaagaaagctttccgtccagaattcttaaaccgaattgacgaaacggttgtcttccattccttaacacaacctgaattgcgcgaaatcgtgaagattatggcgaagaatgtcttgggccgtttagcggaacaagggattcaaatcaagatgacagctgcagcgatggatgttgttgccaaagctgggttcgatcctgaatatggggcacgaccaattcgacgggcgctacaaacccaagtagaagatcagttgagtgaagcgttgcttgctggcgagattacgatgggtgtaccggtgacaattggcgcaactaaaggtaaaattaccattaccagtaagactgataaagtaactgtttaaacgtaaataaggtgtcagaccaattggtctgacaccttatttttttgccctaaaagggtcgtgagctgttcaatttcagttttaatcgcagcgccgatattcgtttgactgacacgttgacgttgactaacttgatcaatcactcgacgcgtggaaataatgtcttgcatcttggcaattgcattggctcgtgtggtgaacggctgatgggtgactaactgcattccatacgaattgtacaggagcgtaaagccaccaatgccagttgtgtggtgataagcttttgaaaagccgccatcaatcacgatcattttgcgattagccatgattggattgtggccttttttgacaggtgtgtgaccattgagaatgtgccccgtttctggcgttaagccaaactccaacaagagtttctcaatgaagtcttcctgatggcggagttggtaatatgcgttcttcttttcttcgtgtaaaacggggtcggcgctgaagtagcgttcgaaggtcgtcatcgcgttcttgccaaatagtggggagagcggtcctgtccacaggtaccagagtaaatcggtggataaattatcttgattgagcgggtggtcgaagctcattcgaatttggtgatcgaagaagtcgagtaatgatttaccagcgtattgtcggttagcgagggttaacgtgaggaagttgccggcttcatcaactggaatacagccgtgaaaaaggagattctggttgtagagttggtacatgctaccgttgtcgattaaaaaacgcagatgcttgcgtagtttttggcagtgggtaaacgcgtttagcaatgatgtaacaatggctgcttcatcggaagttaatatttctgggtgggtggggtcgactgtttgaaagcaggtgttatcaagtgggtagtcatgaccatttagatgaattgtctgctgttcaaagtcaacatggctgagggttaagcggtggtccattttgaaatcaggattgcgtttaatcacggtttgttccaacttaaactgcatgatggcgatggcttggtgcacttggttgatgcttttcttttcagctgttgagattgcgggttgattggcagcaacctttggttcgaaggcgggattgggctgataagttcgttgggcaaactgaaccagttcgctaaggtcaattccgtaagctttctcgatgatggctaaattattgtagcgtgcgcaaatgcgtaaaaggttgagcatacatagttgagaaccgctagcggcgccgaaccagagaatatcatgattgccccactgaatatcaaccgcggggagcttggtgagttgttcgacaatcagatcgggacgcggcccacgatcgtaaatgtcaccgatgatatgccaatgatcaaccactagtcgttgaatcgtatgactggtggcgataattaaggcatcggcttggcccatcgaaatgatggacgtcgtgatttcttggaagtagcgtttcttatcgctgttagctacatcgccgtacattaattcttcggtaatgtagacgaaatcgggcgccattgctttacggacttttgagcgtgtgtattttgtggagacaaattttaagaggtcgattaaccgtttaaaagtggtgaggtaccactgatcgagttcgctagcagatagttgtgcgtgtttgagtgcaagccgctcggttgggtagtaaactaaaaaagcgaacgcctgcattgtgtcttcagtcatttcaccggaaaagacctctgcaattttttgccggagattccctgcgccagtgcgaatgagatgctggaaggcatcatattcgccatgtaaatcactcatgaaggcttcagtgggtttggggaggttcaagatggcctttaagttgatgatttcggaagtaattgccattttagtggggtatttttcggataacgttttcattttattgttaatcattcaccaaactcctttgataaactaatagttcgattataccaatcataaatataaatgcaaattactttgtttaaaagctttttattagtatataccaattaaaaagtcgcgcagtttagcgcgacttctggaaactattgatcttggatggtgccatcaacgtggcgctcaactttcatttgcgtcattgggatgtagcccagtttagggacgattgtcttttgaacgtcttttgattggatgaagtggatgaaacgggctgtttgatagttaggtgcgcccttagtatacatatgttcgtaagaccagattggccatgcattggttgaaacgttcttttcggtaggctcaacgtcgtttaacttaacggcttgcaagttacctttgatgtatgggaaggcgaggtaactgatagcgcctggcgtttgttcgacgattttttgaacagtcccagaggaatcttgttcttggctggtaacaactttgtcggttttaagacctaatttttcaaacgtttgacgtgtcccacttccttgggcccggttgataacggtgattttttcgttaggaccaccaacggattgccagtttgtgatttcgcctttaaagatgcctagcaattgtgcactggttaaatttttgatgcctaactttttattaacaacgggtgcgattgcaaccacagcaactttgtgatcaacaagtttcttagcatcgataccatctttttcttcagcgaagatgtccgagttaccgattgtgacgttgccaccactaatttgggttaaaccagttcctgaaccgccaccttgaacggtgacgttgactttagggttatccttttgatattgatcgccagcttgctcaacaaggggttgaagggctgtcgaaccaactgcagtaattttagcgccttgatcctggctttgacttgcactttttgattggccttgacaaccagctaataaaagagcggccgcaccaactgtgagtaatgccatactaatgcgtttcataatgattcctcctgaggactgatttaagggtacaagttcagtatagagacgtcgtgtaaagattgaccgctaattcgtgtaaaaaacgtaaatgataagtcgcgagtttgtaaatgattccgtgaggggcttgaagattgtatggctgcttattgtgccaatcgagctattttagcgccaattgaatgtgcagaaaagtcgggctattatatggaagtaaaagaacattatggacgctaaattaagggatgaataacccgaggcagattattgacttttagtagtaaaagaagtatattatacagtaactgcgaaaatccgtagaaaaatttattgtgctgatctattgtccagcacggtattcatgaaaaacaaaaatagttagtctgatttattcagcttaaaataactgtttttgttttttttctgctcaaaattacctaaaaatggcgatgtaatattttcttaatatttgtcatatttttgtaacaatgaggctgcggaaaacttatagaggggtgaacaatttggcaggacacttagtgaattacggtaaacatcgtactcgtagaagctacgcacggattaaagaagtgctagaactaccaaacttgatcgagatccaatctaattcctatcaatggtttttagacgaagggcttcgtgaaatgtttgatgacattatgccaattgacgattttgctggtaacttatcattagaattcgttgattaccaacttcttgaacctaaatacacggttgaagaagctagacaacatgatgccaactactcagcaccattacacgttactttgaaattaacaaaccatgaaactggtgaaattaaatctcaagacgttttctttggggacttcccattgatgactgaccaagggactttcatcatcaacggtgctgaacgggtaattgtttctcaattagttcgttcaccaggcgtttatttcaacagcgctgttgataaaaacagccgcacaacttatggtacaactgtcattcctaaccggggtgcatggttagaatttgaaacagatgctaaggatattgcatatgttcggatcgatcggacacgtaagattccaatgtctgttttagttcgtgctttaggttacggttctgatcaagaaattatcgatatcttaggcgacaacgattcattaatgttgacgttagaaaaagatatccataagaatactgacgactcaagaacagaagaagctttgaaggatgtctacgaaagacttcgcccaggcgaaccgaagacagctgatagctcacgttcattactttatgcacgtttcttcgatgctaaacgttatgatttagctgctgttggtcgttacaagatcaacaagaaattaagcttaaagacgcgtttattgggtcaaacattagctgaaacacttgctgatcccgatactggtgaagtgattgctgctaaagatacagttgttgatcgtcaagtgatggatgctttggcaccatacttagacaaagaagacttcaagacggttacttaccaaccatctgatgaaggtgtcttaccagaaccaatgacactccaagtgatcaaagtgtactcacaaaaaacacctgataaagaaatcaacttaatcggtaacggtcatatcgatgccaagattaagcatgttattcctgctgatatcatcgcttcaatgaactacttctttaacttacaagaaggtctcggttcaacggatgatattgatcatttagggaatcgtcggattcgttcagttggtgaattgttacaaaaccaattccgaattggtttatcacggatggaacgtgtggttcgtgaacggatgtcaatccaagacacaagcaccgtgacaccacaacaattgatcaatattcgcccagttgttgcctcaattaaggaattctttggttcatcacaattgtcacaattcatggatcaaaccaatccccttggcgaattgacgcataaacgtcgtctatctgccttaggacctggtggtttgactcgtgaccgtgccggttatgaagttcgagatgttcactatacccattatggtcgtatgtgcccaatcgaaacccctgaaggccctaatatcggtttgattaacagtttggctagttacgctgttgttaaccgttacggcttcatcgaaacaccatatcgccgtgttagttgggatacgcatgatgttactgataagatcgactatttaacagccgacgaagaagataactatgtcattgcgcaagccaactcaccattaaacgatgatggttcattcgttgatgatactgttttagcacgttacaaagatgacaatattgaaacttcaatcgacaagttagattacatggacgtttcgcctaagcaagtagttgctgtcgctacggcctgcattcctttcttggaaaatgatgattcaaaccgtgccttgatgggtgctaacatgcaacgtcaagctgtgccattggttgacccacacgcaccacttgttgggacagggatggaatataaagcagcccacgattcagggattgctttattagcacaacatcccggaactgttgaatacgttgatgcgaaagtgattcgcgttcgtcgtgaagacagctcattagatacgtacgaattaatgaaattccgtcgttcaaatgctggtaagaactacaaccaacgtccaatcgttgcaaaaggcgatcacgttgatgttgatgaaattatcgctgatggaccagctatggaaaaaggtgaattagccttaggtcaaaacccattgattgctttcatgacttggaatatgtataactacgaagatgcgatcgttctttcagaacgtttagtgaaagaagatttatatacttcaatccatattgaagaatacgagtcagaagctcgtgatacaaaacttggacctgaagaaatcacacgcgaaattcctaacgttggtgaagattcattgaaggatcttgacgaattcgggattgtccgtgttggtgctgaagtcaaagatggcgacattttagttggtaaggtaacgcctaagggtgtgacagaattatcagccgaagaacgcttattgcacgctattttcggtgaaaaggctcgcgaagttcgcgatacatcattgaaagtacctcatggtggcggcgggattatccaagacgttaagatctttacgcgtgaagctggcgatgaattgtcaccaggtgttaacatgatggttcgtgtttacattacacaaaaacgtaagatccaagtcggcgataagatggctggtcgtcatggtaacaaagggactgtttcaatcgttgttcctgaagaagatatgccatacatgccagatggtaccccagttgatatcttattgagtcccatgggtgtgccttctcgtatgaatatcggacaagttcttgaattacatcttgggatggctgctagaaacttaggcatccatgttgcaacaccagtctttgatggtgcgcaagataaagatttatgggacgctgttcgtgaagcaaacatgccttctgatggtaagagcattctttatgatggtcggaccggtgaaccattcgatacacgtgtgtcagttggtgtcatgtactacatgaaactagcccacatggttgacgataaactccatgcacgttcaatcggaccttactcacttgttacgcaacaaccattgggtggtaaagctcaatttggtggccaacgtttcggtgaaatggaagtttgggctcttgaagcttacggtgccgcttataccttacaagaaatcttaacttacaagtctgatgacgttgttggtcgtgtgaagacatacgaagcaatcgttaagggtgaaccaattccaaaaccaggtgttccggaatcattccgagtattggttaaagaattacaatcacttggcttggatatgaaggtcttggatatcgataatcaagaaattgaattacgcgatatggacgacgatgatgatgatatcgaaaacatcgatgcattatctaaatacgctaaagaacaagaagccaaaaaggcacaagaagaagctgaaaaagcacaagcagcaaatgctgatgcagtagatccatctgctgaataaagcgtgctataaattatgaggaggtcggccctttgatagatgtcaataagtttgaaagtatgcaaattggtttagcatcttcagataaaatccgtagttggtcgtatggtgaagttaaaaagccagaaacaatcaactaccgtactttaaaacctgaacgtgatggcctttttgatgaacgaatcttcggacctacgaaagattgggaatgtgcttgtggtaagtacaaacgaattcgttataaaggaattgtctgtgatcgttgtggcgttgaagttacacgttcaaaagtgcgtcgcgaacgcatgggacatatcgaacttgcagcaccagtaacacatatctggtactttaaagggattcctagccggatgggtcttgtcttagacatgagccctcgtgcattggaagaaattatttacttcgcatcatacgttgtgattgatccaggcgatacagccttagaaaagaaacaactgatgaccgaacgtgaatatcgtgaaaaattagatgaatacggtaatcgttttaacgctaagatgggtgctgaagccatcaaagaattgttacgtgacgttgatcttgaaggcgaagttgctgaattaaaggaagacttgaagtcagcacaaggtcaaaagagaacgcgtgctatccgtcgtttggacatcttagatgccttccgtaaatcagggaataaccctgaatggatggttatggatgctattccagttattccaccagatttacgtccgatggttcaattggaaggtggccgttttgccacatctgatttgaatgatttgtaccgtcgtgtgatcaaccgtaacaaccgtttgaaacgcttgttagacttgatggcaccaagcatcatcgttcaaaacgaaaaacggatgttacaagaagccgttgatgctttgattgataatggtcgtcgtggccgtccagttactggacctggtaaccgtccattgaagtctctttcacacatgttgaaagggaaacaaggtcgtttccgtcaaaacttacttggtaaacgtgtcgattattctggtcgttccgttatcgatgttggtcctacattgaagttctatcaatgtggattaccacgtgaaatggcacttgaattgttcaaaccattcgtcatgcacgaattagtgaaacgcgatatggcttcaaacattaaaaatgcaaaacgtaaaattgatcgtcaagatgacgatgtttgggatgttttagaagatgtcatcaaggaacgcccagttctattgaaccgagcacctacattgcatagacttggtatccaagcattcgaaccaatcctggttgatggtaagtcaatccgtcttcatccattagcttgtgaagcttacaatgccgatttcgatggggatcaaatggcgatccacgtacctttatctgatgaagcacaagcagaagcaagaatgttaatgcttgccgctcaccatattttggcaccaaaagatggtaaaccaatcgttacaccttctcaagacgttgttttagggaactactacttaacgcttgaacaaaaaggtagtctcggcgaaggcatgatcttcaaagatacaaacgaagttttaatggcttatcaaacaggtcacgttcatttgcacagtcggattggtttgtcagttgttgatatggataatcgtccattccctgacgaacaacgccacaagattatggtaacaagtgttggtaaagtgatgttcaacgaaatcatgccaactggcttcccatatttgaacgaaccaacaacagataacttgatgaatggtgtgccagataaatacttcatcgataacggtgaagatattcatgactacctctcaagtgccccagtgatcttaccatttaagaaaggcttcttaagtgatatcatcgcgcaagtcttcaaggtatataaggttcaacggacatctgacttattggatgatatgaagaccttaggttacgttcaagcgacccatgctggtttaacagttggggttgccgatgttcctcaattacctgaaaaacaagaaattgttgatgaagcccataagaaagtcacaacggtttctaaacaattccgtcgtgggttgattacagatgaagaacgccatgcgcgcgttattgaaatctggaacgatgctaaagacgatatccaacaacgactcacagattcgtttgatccaacaaacccaatctcaatgatgtctgattctggtgcccgtggtaacatctctaactttacgcaacttgctggtatgcgtgggttgatggctgctcctaatggtgggatgatggaagttcctgttacatcaaacttccgtgaaggcctctctgtcatggaaatgtttatgtctacccatggtgcccgtaaagggatgactgatacggcgcttaagactgccgattctggttacttaacacgtcgtttagttgatgttgctcaagacgttatcattcgtgaagaagattgtgggactgatcgcggtcttctcattcactcaattcgcgaaggtaatgaattaatcgaaccattgtatgaccgtcttgttggtcgttgtgcaatgaagaccattgttaatccaacaacgggtgaagtgatggttcaacgtaaccaattaatggatgaacaacttgctcaagctgttgttgatgccggtgttgaagaagtcacaattcgttctgtcttcacatgtaacacaaaacacggtgtctgcaaaaaatgttacggtcgtaacatggccaacggcgaagaagttgaagttggtgaagcagtcggaacagtcgcagctcaatcaatcggtgaacctggtacgcaattaaccatgcgtaacttccataccggtggggttgccggcggtgaagatatcactcaaggtttgcctcgtatccaagaaattttcgaagcgcgtaatcctaaggggcttgcaacaatcactgaagtaactggtgaagttgttgcggtggaagaaaaccctgcagaacatacacgtgaaatcactgttcaaggtgaaacagatacacgttcatatagtgtgccttacacagccaacgtcatcgttaacgaaggcgacatggttcgtcgtggttctaagttaacgggtggttctgttgatcctaaacaattaattaaagtccgtgacgtcttatcaactgaaaactacctcttgcatgaagttcaaaaagtttaccgtatgcaaggtgttgaaatcggcgataaacacgttgaagttatggtccgtcaaatgctacgtaaagtccgtgtcatggatccgggtgatacagaaatcttacctggtacattaatggatattagtgaatttacagaccgtaaccacgaaaccttaattagcggtggcgtacctgctacttgtcgtcctgtcttgcttggtattacgaaagcatcattggaaacaaatagtttcttatcagccgcatcattccaagagacaacacgtgtcttaacggatgcttctatccgcggtaagagcgatccattacttggtttgaaagaaaatgttatcatcggtaagattgtcccagctggtactggtatggcgaagtatcgtcatatggaacctaagacagtcggtgctgtatcagaaaatgtctactcaatcagtgacatcgaagcacagatgaaagaagaaacaaaagaataactgagtgccaatttagaacagttgctctaaattgcacgttaaagggcctcaccgacatggtgaggcccttttttatgtgtttgcaataaacaaaacgattaagacaccgtagctgatatacgggacaaatggaattgggcggcgtccgactaaggcgaggacaactggatggtggagactatcaatgagatatttgattaaacagaggagacaggcaattaataacatggatagggtgacctccaatccaaaccacaacccaagaattgccaataattcaatgtcaccagtaccgatgccatctgaaaagtagttgatgacagataaggtgctgccaatcaatagggcactgagccaatggtttgtcggccagtagtcaataaacaaaggcataaaagccagtaccattggaactgggtatagagctgtatggaaaatatcgactaggctcaacaaataaaggataagcaataaatagccaatctgtggtgtgaaatattgactggctaaacaacacgctaacaagccgccaataacctcactagtaaaaaaatggtgctggattcgagtatcacaatagcggcagtgccctctgagaatgaggtaactgataattggacataagtcgtaccaagcgagggcgtgatggcagaagtcacaccgtgaaccaggccatgtgatggataaaccgagtggccaacgccaagcacaaacagttaaaaaagaggcgcaacacgcgccaataacaaaggttaaaaaatatattaacaaacgtgtcatctcctttatgatagctacaaaaaaagggcgcaactttttctgaaaaactggcttatagcacgttgactttcgtagttgtgcatgctattcttgtagatgtgctttttacggaagttttctgatattcagacatgctgactgacgtctaaaaatgcattacaatccacgcaatctaggttgccatttttttatcgcaaaaaaagaaccacctggatgtgtggacttaaaactcaaaaataactttcagatcaaggaaggaggaaccttcaaatgccaacaattaaccaattggtacgtaagggtcgtaaatcaagaacttcaaagtctgatgcacctgcattaaactttggctacaacagtatgaagaaaaaagctacagataatccagcaccacaaaaacgtggggttgctactcgtgtgggtactatgacacctaaaaagcctaactctgctttacgtaagtatgcgcgtgtgcgtttatctaacttaatcgaagttacagcttatattcctggtattggtcataacctacaagaacatagtgttgttcttatccgtgggggccgtgttaaggatttacctggggtacgttatcacgttatccgtggtgctttagatactgccggtgttgacggtcgtatgcaaagccgttctaagtatggtactaagagacctaaaaaataacacacaaaaaaatttgaaaaagtcgattgaagtttaaatgacactgtgtgttacttcaaggacttaaatatcttgaggaggttatcaggatgccaagaaaaggctatgttgcaaaacgtgacgttttacctgatccaatgtacaattctaaattggtttcacgcttaatcaaccgcttaatggttgatggtaaacgtggtactgcgtcaacaatcttatacgatgcatttgatattattaaagaagaaactggtaatgaaccattagaagtgttcgaagaagctatgaacaacatcatgccagtacttgaagttaaagctcgccgtatcggtggttctaactaccaagtaccaattgaagttcgtccagaacgtcgtacaactttaggtttacgctggttagtaagctatgctcgcctacgtggggaacataccatggatcaacgtcttgcacgtgaaatcatggatgctgccaataacactggtgctgcagttaagaaacgtgaagatacacataaaatggctgatgccaaccgcgcatttgcacattatcgctggtaagattaacaaggttggctgttatatgtattcaaatcatataatggcctcttgttgtatatagcttaatattcgagaggagtaatattcacttatggcaaacaaacgtgaatttccgttagacaaaacgcgtaatatcggtatcatggctcatattgatgctggtaagacaacaaccacagaacgtatcttgtactacactggtaaaatccataagatcggtgaaacccacgaaggggcttcacaaatggactggatggaacaagaacaagaacgtgggattacaattacatcagctgctacaacagctgaatggaaaggtaaccgagttaatatcattgatacaccaggacacgttgatttcacaatcgaagttgaacgttcattgcgtgttttagatggtgcaatcactgtcttagatgctcaatcaggtgttgaacctcaaactgaaaatgtttggcgtcaagcaactacttatggtgttccccggattgttttcgttaacaagatggacaaacttggtgctaacttcgattactcaatgacaacattggaagatcgtttacaagctaatgcacatgctgttcaaatgccaatcggcgctgaagatgaattccaaggcgttattgatttgatcgaaatgcaagctgacatctatgatgaagatgaattaggtgctaagtgggatacagttgatgtacctgctgactaccttgaagaagctacaaaacgtcgtgccgaattagttgaagctgttgctgatgttaatgacgacattatggacaaatatttagaaggcgaagaaatttctaaagatgaattgaaagctgctattcgtcaagcaactatcgatttgaaattcttcccagttttcgctggttcagctttcaaaaataaaggtgttcaaatgttaatggatggtgttgtagattacttaccatcaccattagacgtacgtccttataacgctaaaaacccagaagatgattcagaagttgaattgatggctggcgatgacaaaccatttgctggtttagcatttaagattgctactgacccattcgttggtcgtttaacattcttccgtgtttatactggtacattacaatctggttcatacattttgaatgcaactaaagacaaacgtgaacgtgttggtcgtttattacaaatgcattcaaatcaccgtaacgaaattcctgaagtattctctggggatatcgctgctgcaatcggtttgaagaatacaacaactggtgattcattgactgacgttgatcatccattaatcttggaatcaatggaattccctgacccagttatccaagtttctgttgaacctgaatcaaaagaagatcgtgataagttagatcttgctttacaaaaacttgctgaagaagatcctacattcaaggctgaaaccaacaatgaaacaggtgaaacgcttatttctgggatgggtgaattgcatttggatatcatggttgatcgtatgagacgtgaatttaaagtggttgccaaaattggtgaacctcaagttgcttaccgtgaaacattcacaaaacaagcatctgcacaaggtaaattcgttcgtcaatccggtggtaaaggtcaatatggtgatgtttgggttgaatttacacctaacgaagaaggtaaaggcttcgaattcgaagacgctatcgtcggtggtgtggttcctcgtgaatacatcccatcagttgaacaaggcttgaaagaatcaatggcaaacggtgtcttagctggttacccattgattgacgttaaagctaagttatatgatggtagttatcatgatgtcgattctaatgaatcagcatttaagattgctgcatcaatggcattgaagaacgctgctaaacaagctggcgctgaaatccttgaacctatcatgaaggttgaagttattgctcctgaagaatatcttggcgatatcatgggacaagtaactgctcgtcgtggtgctgttgaaggtatggaagcacgtggtaatgcccaaatcgttaatgcaatggtaccattgtcagaaatgtttggttatgcgacaacattacgttcagctacacaaggtcgtgggacatttacaatggtatttgaccactactcagctgttcctaagagcatccaagaagaaatcatcaagaagaacggtggccaataagtcgctaatcttaagtgattggtttcgattggaaaaggactcgtcattgcgacgagtcctttttttgtgcgtaaaaatgcgattttacagtttcgtaaatgaaagttcatatttaattcataactggttggtattctgtatacatcagatgaattcctcccaagaaataatctgaaaaggtaaaaatgcttttcaaggtggttagcttttgagcataacatagcgaggataatgagcaacgaaggtgatcgttgtcttcgcgtagttaggcggaaaaagttaccttgaaaagcaagattaaatgaattttcattagacaattcctccctaaagaatccgtctaagtaaagcaccgccaatgagttatagtttaatggtaaaacgaaccggcccatttgaaattcctcccaagaacagtgaatggttttctggtgattgatagagacttgctttcgaaggcgtaaggatttgttgatcattaagactggttcatgcgggttcaatccccgctaactcgatttgccaccgccctggcaaaaaaactcaaactctttttcatataaacttctccaaaaaagggagttacgacaaaaatcacttttgtcgtaactccctttttgtgtttctaggcacggcttactgagttagttttgttttgtaggacgtgttttcaaactgcccatcagacgtttaacctttgcttgttcgatttcgcgggcggatagttgactatagtccgcttcgatagccagtttattgaaatcagctagccgttcaggcattaatgaacctgcatcgattgcggctcgtacggcgcaactgggttcgctttgatgctggcaatccttaaatcgacagtcctgtgcgagcgtctcaatatcagtaaagactgtcttgagtgccttagacatgctacttgtcatgccgagttcgcgcatgccaggagtatcgacgatgaaggccccgctagcagtttgataggcttgtcgattggtggttgtgtggcgccccttatcatcgtcagcgcgaatgccgctcgttaaaacggaaggctctttaatgagctggttgatcagggttgatttaccaacgccggatgagccgacaaatgtcacccattgtccagctgttaaatacggtttgaaagtcgctgcaacatttgatgccgtctggccagttgtgatgacgggaacgctgtcgaatgtcacacttgcgatggcgtcaagaaaggttgttagctcagagtcgctgactaaatcggttttactcaaaacaatcaccggtgttgcgccgctatcccaagccatcgttaaatagcgttgtaagcgcgcttcgctgaattcttgattggcggatgttacgatgaaaatcgttgcaatattggccgctaaagtttgaatccgttgttgcttattactgttgtgtcgttgaataagcgtgtgccgggggagatgtccttggatttggaaataatccgtatcatagatcacgccggtcacttgatcgccgacaatgggcaggtcgttagtgctttctgccaagtggcggtaccgaccgctgattgttgcggttaattcttgatgattgagtaggactttgtaatggccttgactttgaaaaattaaaaaagctgtttgttgtgtttgcatgatgatgcgcctccagtatgttatttcatgataatctaaatgaaataatggcggcactggctatctaagcagcgaataccgccattgatagcacaattgctgtgtttgtttttaacataaaaagaatctcctttatatagaatgggtacattgtcccgtcatttaagatagcaaatgatcgttaaaagtcaaattagataattgtagctccgaggctgtttttgaaatgcgcgagtgcccattcttgcccgttcggtgtaaaagttgcgacagcagcggctggaattgttagtgggtaatttaagttgtatgccgagactgcagtgtggagcacgcaaatgtcggtgcaaacgccagtcagtgttaacgcgtcaatctcgcgctcgcgtaagaaattatccagattagtgttagcaaatgctgaatagcgattctttgcaaatgcatagacgtgaggatcggtttggtgcttggtgtaccagctagctagtggtccgtaaaactcacggccccaagtattggctagattatgtggtgggaatagggcgctctctggatgaaatggatcatccttgacgtgtaaatcagtcggtaagatgacgtaatcaccggctgctaggaactggttagctaattcgataattacaggaacgatttgctgagcgggtttgccggctgtcagagcaccgtttgggtcaacgaagtcatttgtatagtcgataatcaaaagtgcgttatgggacatgataaggacctcctggaggggatttaagttgctttcagtgtatcaaaagatggctagaaatccacgaatgacgcttgctacaagatttatgaaaatgttatgaaaaactttgataaatcagcaaaaaagggttgcgttatcgggttgtatcttgtaagatagataaagtgctatttccatagcaggagtgcgcaccatggtagtcaaaaagattaccgagtagctaagatgtgagaggttgcgacacacccggccgctttgccatgggcgggcgtgccggaaaaattttcacggagctagtctacttttaaaatagacgaaggagggaaaaacatggcaaaacaaaagattcgtattcgtttgaaagcattcgaacaccgtattttggatcaatcagctgacaagattgtggaaacagcaaagagaacaggtgctactatctctggcccaatcccattaccaactgaaagaacactttatacagtgcttcgttcaccacataagcataaagattcacgtgaacaattcgaaatgcgtacacacaaacgtttaatcgatattgttaaccctacacctaagacagttgattcattgatgaaacttgacttaccaagtggtgtagatatcgaaatcaagctttaattcgtaccaaccaattaaaaatactagaaaagaggtgttaccatgaccacaaaaggaatcttaggtagaaaagtaggtatgacacaagtctttactgaaaacggcgaattaattcccgtaacagttatcaaagcaactccaaacgttgttttacaagttaaaacaaacgaaacagacggctatgaagccatccaagttggttttgaagataaacgtgaagtcttgtcaaacaaacctgctaaaggtcatgtagcaaaagcaaatactactcctaagcgcttcattagagaattcagagatgtcgcattaggagattacgaagtaggaacagaaatcaaagttgatactttcgcagccggcgacgtcgttgacgttactggtgtaacgaaaggtcatggtttccaaggtaacattaaaaaagacggacaatcacgtgggcctatgggtcacggttctcgttaccaccgtcgtcctggttcaatgggtgctgttatcaaccgtgtcttcaagggtaaattattacctggacgcatgggtaacaaccaacgtactgttcaaaaccttgtggttgtaagtacagatgttgaaaagaacgttatccttgttaaaggtaacgtgccaggtgctaaaaactcaatgattacaatcaaaacagctgttaaagctcgtaacaaataatctgagaagggaggattttaccaatggcaaacgtaacattatttaaacaagatggtagccaaaatgggaacgttgaattaaacgactcaatctgggctatcgaacctaacgaaaacgttgtgtttgatgcaatcatcatgcaacgtgcttcattaagacaaggaacacacgctgttaagaacagatcagctgttcgtggtggtggtcgtaaaccttggcgtcaaaaaggtacaggtcgtgctcgtcaaggctcaatccgttcacctcaatggcgtggtggtggtaccgtatttggtcctacacctcgttcatacagctacaaattacctcgtaaagtacgtcgtcttgcaatcaagtcagtactttcacaaaaggttatcgacaatgatttagttgttgtagatgcattcaactttgacgcacctaagactaaagaattcgctgaagtacttaacaagttagacgttaatactaaagcattggtagtacttgaagacggaaatgattttgctgcattatcagctcgcaacttacctaacgtaaccgttgtagctgctgatggtatcaacgtattagacgttgttggcaaccaaaaattaatccttactcaagctgctctttctaaaattgaggaggtgcttgcataatggaagcacgcgatgttattttacgcccagtagttactgaaaattcaatggctgcaatggacgacaagaaatacacatttgatgttgatgttcgtgccaacaaaacacaagtgcgttacgcaatcgaagaaatctttggtgtaaacgttaaaaacgtaaacatcatgaacgttcgtggcaagttaaaacgtcaaggtcgctatgctggctatactaaaaaacgccgtaaagcaatcgttactttaactgctgattcaaaagaaatcaagattttcgaagattaagcaacacttaaatagaataattataggagggtatacacgtgggaattattaagtacaaaccaaccacaaatggtcgtcgtaatatgaccagctcagattttgctgagatcacaaagacaacccctgaaaagacgttgttggaatcccaaagccatactgctggtcgtaatgcacatggtcatatcactgttcgtcatcgtggcggcggtcataagcaaaaataccgtgtcatcgacttcaaacgtatcaaagatggtatcaaagcgactgttaagtcaattgaatacgatccaaacagaacttcaaatattgcattaatccaatatccagatggtatcaaagcatacatcatcgcccctaaaggtcttgaagtaggcatggttgttgaatctggtgtggatgccgatattaaagtaggtaacgcattaccattagctaatattcctgatggtacacttatccacaatatcgaattaaaacctggtaaaggcggccaattggttcgttcagctggtacatcagctcaattattaggtaaagaaggcaaatacgctatcgttcgtttaacttctggcgaaacacgtatgatcctacttacatgtcgtgcaacgatcggtactgttggtaacggtcaacacgaattaatcaagattggtaaagctggccgtaaacgttggatgggtatccgtcctacagttcgtgggtcagtaatgaaccctaacgatcatcctcatggtggtggtgaaggtaaagctccaatcggtcgtccttctcctatgtctccatggggtaagaagacgcttggtaagaagactcgtagtagtaaggctcgttcagagaaacttattattcgtcatcgtaaatcaagataatcaattccaattgaacatgtctaaagccaatgcggcttaaacataagtcacattgaactttttattcgaaggaggtttcataatgagtcgtagtttgaaaaaaggaccattcgcagacgcacacttgctcaacaagattgaagcacaagccgatagcgaaaagaaacaagtcatcaagacttggtcccgtcgctcgacaattttccctagctttattggctacacaatcgctgtttatgacggacggaaacacgttcccgttttcatctcagacgatatggtaggccataaattaggtgaattcgtaccaacaagaactttccatggtcatggaaatgacgataagaaaacaaaagcacgctagaaaggaggatgaatctcaatggcagatcaaattactagtgcaacagctagcgcaaaatcagttcggatggcagcccgtaaagtacggatggtagtcgacttgattagaggcaagagcgttgcagaagcaattgcaatcttagaatttacaccaagagctgcttcaccagtcgtaatcaaagttttgaaatcagctatcgctaatgcagaacataattacgacttagatgcagaaaacttggtcgttacagaagcttatgctaacgaaggaccaacattgaaacgttttcgtcctcgcgctaaaggctcagcatcaccaatcaacaaacgtacaagtcacatcactgtagttgtatcagaaaaagaagcataaggagggatatcgcgtgggtcaaaagattaatccaaccggttttcgtgttggcgtcatccgtgattgggacgctaaatggtatgcagaaaaagatttcgcaacattcttacacgaagatcttaagattcgtaaatatatcaacacaaaattagctgacgcatctgtctctactattgaaatcgaacgcgctgcaaatcgcgtgaacgtttcaatccatactgctaaacctggtatggtcatcggtaaaggcggttctgaagtagaaaatctacgtaaagaattaaacaacttaacaggtaagaaagtacacatcaacattgtggaaatcaagaaacctgatttagacgctcacttagtaggtgaaggcattgctcgtcaattggaagcacgtgttgctttccgtcgcgctcaacgccaagctatgcaacgtacaatgcgcgctggtgctaagggtattaaaactcaagttgccggccgtttgaacggtgctgacatgtctcgtgtcgaaacacatgctcaaggaactgttcctttgcatacgctacgtgcagacatcgattattcatgggacgaagccatgactacttacggtaaattaggagttaagacttggatttatcggggcgaagtattacccgctaaagccaacaacaatacgaaaggagggaaataaacatgttagtacctaaacgtgtaaaacatcgtcgtgaattccgtgggaagatgcgcggtgctgcaaaaggtggtaaagaagtcacttttggtgaattcgggctacaagctttagaatcaagttggattaccaaccgtcaaatcgaagctgctcgtgttgccatgactcgttacatgaaacgtggtgggaaagtgtggattaaaattttccctcacaaatcatacactgcaaaaggtgtcggcgttcgaatgggttcaggtaagggtgctcctgctggatgggttgctgtagtaaaacgtgaaaaagtcatgtttgaaatcggcggcgtttctgaagaagttgctcgtgaagcattacgcttggcatcacataaattgccagttaaaactaagatcgtaaaacgcgaggaagtaggtggcgagtcaaatgaaggctaaagatattattgaattaaccactgctgaaatgcttgaaaaagaacaccaatacaaagaagaattattcaatcttcgtttccaacaagctaccggtcaattagaaaataccgcccgcttaaagcaagttcgtcagaacattgcacggattaaaactgtattacgtcaacaagaacttaacaaataataaatggaaaggagctatttactttgagcgaagaaagtcgtaaccatcgtaaagtgtaccaaggccgtgttgtttcagacaaaatggataaaacaattactgtcgtggttgaaacttataaaacacatcctgaatatggtaaacgtgttagatattcaaagaaatattatgcacaagatgacaacaacgaagcaaaagttggcgacgttgtgcgtgttatggaaactcgtcctttgtcacgtacaaaacggttccgtttattagatgtcgttgaaaaagcagttattatctaaatcgttactcaatatatatataagtgacggaaggaggacctataagtgattcaatcagaaagtcgtcttaaggttgctgataactccggtgcccgcgaaattttaactattaaagttttgggtggttcaggtcgcaagactgctaacatcggtgatgttatcgttgcaacaattaaacaggcaacaccaggtggcgttgtcaaaaaaggtgaagttgtcaaagctgttatcgttcgtactaagtcaggtgctcgtcgtgcagacggttcttacatcaagttcgacgaaaacgctgctgttatcatcaatgatgacaagactccaaaaggaacacgtatcttcgggccagttgcacgtgaattgcgtgacagtgatttcatgaagatcgtttccttagcgcctgaagttctataattacagacaaccaaggaggtgcgtatatcaatgttcgttaaaactggtgataaagttaaagtaatcagtggtaaagataaaggtaaagaaggtacaatcatcaaagctatgcctaaagaaggccgtgttgttgttgaaggtatcaataccattaaaaagcatgttaagccaaatgctcaaaaccctaatggtgggattgttgacacagaggcaagtatcgatgcttcaaacgttatgctaattgatccatcaaccaacgaagctactcgtgtaggtttcaaagtgattgatggtaagaaagtacgcgtttcaaagaaaactggagaatcaatcgataaataatcttttggggaaaggaggcactttttacatgactaaccgtttaaaagaaaaatatgttaaagaaatgacaccagcgttgatcgaaaagttcaactacacatcaagcatgcaagtacctaagatcgaaaagatcgtacttaacatgggtgttggtgatgctgtttcaaacgctaagaatttggataaagctgttgaagaattaggtttgattgctggtcaaaaaccattaatcacaaaagctaagaaatcaatcgctggtttccgtttacgtgaaggtatgccaatcggcgctaaagtaactttacgtggcgaaagaatgtacgatttcttagataaattagttaacgtatctttacctcgtgttcgtgattttcacggtgttagtgcaaaatcattcgatggtcgcggtaattatacattaggtgtacgcgaacaattgatcttccctgaaatcgattatgataaggtagatcgcgttcgtggtttggatgttgttattgtaacaacttcaaatactgacgaagaagcacgcgaattgttaacacaatttggcatgccatttgctaaataaaaagggaggtcaatttcttggctaaaaaatctttagttgtaaagaatcatcgtccagcaaaattttcaacacaagaatattcacgttgcgaacgttgtggacgtccacattctgtatatcgtaagtttaagctttgccgggtttgcctccgtgaattagctcataagggccaaattccaggcatgaaaaaagcaagctggtaattataaagagtcaataaggaggttaattccacatggtcatgacagatccaatcgcagactatctaacacgtattcgtaatgccaacatggtacatcacgaatcattagaagtccctgcttcacgtatgaaaaaagaaatttctgaaattttgaaacgcgaaggctttatccgcgattacgaagtgattgaagacgacaaacaaggtatcatccgtgtattcttgaaatatggtaagaataacgaacgtgttatctctggtttgaaacggatttcaaaacctggtttacgtaattacgttaaagctaatgatgttcctaaggtattaaacggcttaggcatcgcaattatctcaacaagcaacggtgtcgtaactgacaaagaagctcgtgaaaaggctgccggcggcgaagttctcgcatacgtttggtaatctaaacttaaaataaggaggtgtcataacgtgagtcgtatcggattaaaagtaatcgaagttcctgcaggtgttaccgttactaaagacggtgaaaacatcacagttaagggacctaaaggtgaactaacacgtcatttcagtccagtgattgaaatgcacgaagaaggtaaccttatcaactttacacgtaatagtgaaagtgatcgtgcaatgcacggtactatgcgtgctaacttaaacaacatgatcttgggcgtaacggaaggtttcaagaagacattggatcttatcggtgttggttaccgtgctcaattgaaaggcaagactttagtattgaacgttgggtattcacatccagttgaaatggaagccccagaaggcgttacagtcgaagtcccatcaaacacaaacatcatcatcagcggtattagcaaacaacaagttggccaattcgcagctgaaatccgtgatgttcgtcctccagaaccttacaaaggtaaaggtattcgttatactgatgaatatgttcgccgtaaagaaggtaaaactggtaaataaagcagcctgagctgttaaacgatattaagaggtgaaaattgtgattacaaaaccagacaagaataagacacgtcaaaaacgccatacacgcgttcgtggcaagatctctggtactgctgactgcccacgcttgaacgttttccgttctaacaaaaacatctacgctcaacttattgatgacgtagcgggtgtgacgctagcaagtgcctcaacattagataaagaagtaaaagcagaaggtactaaagtagaacaagcacaacaagttggcgcattagttgcacaacgcgctgttaaagccggccataaagttgttgtttttgatcgtggcggttacttataccacggtcgtatcgaagctttagctacagctgctcgtgaaaacggactagaattctaataaggaggaaaaccatttatgacttacattgatccaactcatttagatttagaagatcgcgttgtttcaatcaaccgtgttacaaaagttgttaaaggtggacgtcgtctacgtttcgcagcaatcgtaatcgttggtgataaagacggtcacgtaggtttcgggacaggtaaagcacaagaagttcctgaagctatccgtaaagccgttgaagacgctaaaaagaatcttatcaatgttcctaaggtcggaacaacattacctcatgaaattattggtcgcttcggcgctggtcgtgttctattaaaaccagctgttgaaggttctggtattgctgccggtggtgctgttcgtgccgtcatggaattagcaggaatcgatgatgtgacaagtaaaacattaggtagcaaaactgctatcaatgttatccgtgccacaattgacggtttaactcgtatgaagactgctgaagaaattgcagaattacgtaatgtatctgtagaaagcttacaaaactaggaggataactgaacatggctaaattaaagattactttaagaaaaagtgctgctcatcgtcttccagaacaacgtaaaatggtcaaagaatttggcttgaaccgagtaaatagttctgtaatcaaaccagatgatgctgcaactcgcggtgtgattttcaaactcgcacatttagtaacagtcgaagaaattaaagactaatttcaacatatattgcaaggaggtgcgcacaataatgaaattacatgaaatgaaacctaacgaaggtgctcgtgacgttcgtaaacgtgtcggccgtggtacttcttcaggtactggtaaaactgctggtcgtggtcaaaaaggccaaaaagctcgtagtaaagtacgtttaggatttgaaggtggacaaatgcctttattccgtcgtatgccaaaacgtggattcaagaatatcaaccgtaaggaatatgctgttgtcaacttaaacgatttaaatcgttttgaagacggtgcagaaattacttcaactgttttaatcgaagcaggcgttgttaagaatgaattatcaggtgttaaattattagcgaatggtgaattaaacaaaaaattgaacattaaggtaagcaagtattctgaagctgcaaaagctgctgtagaagctgctggcggttcaattgaggtgatttaattgctaaagacactcaaaaacgcatttaaagtaaaggaaatccgtagtaagattttgtttactttaggcgttttgatcgtttatcgtttaggtgcacaaattacggtaccaggtgtgaatgctggtgcattgactaagttgggttcaactggtttgatcccattgcttgataccgtaagtggtggtggcttggcgaactattccatcttctcgatgggggtttcaccattcatcactgcccaaattgtggttcaattactacaaatggatattgtgcctaagtttgttgaatggagcaagcaaggtgaagttgggcgacgtaagcttaaccaagtaacgcgttacttaaccatcatcttagcgtttatccaatcgatagggattaccgctggctttaactcactcagtcaaatgggcttggttaaagatccggggattaagaccttcgttagcatcgggatcattttaacgggtggtacgatgttaattacatggttgggtgaacagataacggataaaggcttagggaatggtgtgtcaatgatcatctttgcagggatcattgcacgccttccaagcggtctttaccaaatcttccgcgaacaagtcttgaacgcttcaaaaggcgatatgtggaaaggtgtcttattcatcatcggtttgattattgcagtactcgtgattgtcacatttgtgacatgggtccaacaagcaaatcgaaagattccgattcaatatacgcgtcgtgaagctggtgcaggtgaaaatagttacctaccccttaaagttaacgtcgctggtgtgattccggttatcttcgccagttcatttattatgacacctcaaacaatcttactggccttccaatcaggtcatggtgcagatacttggtttaaagtattatcagatatcttcagcatgcagactgtgacaggttcgattgtttatacggtgctcattgttctctttaccttcttctatgcttttgttcaggttaaccctgaaaaagttgcggagaacttgactaagcaagggagttatatcccaggtgtttggccaggtaaaggtaccgagaagtatctttctagcgtattaatgcgtctttcaactgtcggtgcgttgttccttggggtaattgcattattaccacaattagcagcaaacctcggtggcttacctcaatcaattggtttgggtgggacgagtttactaatcgttgttggtgttgcgcttgaaagcacacgtcaactcgaagggttacttatgaaacgcaagtatgttggattcattcgataagcaattatcgtttaaaaagtattaaatcctggttttaaataggaggcaaaggcatgaatctcatgttaatgggacttcccggcgctggtaagggaacgcaagctgaaaagattgttgacgcttatcatattccacacatttcaactggtgacatgttcagagctgctatggcagatcaaacagaacttggggttaaagctaagtcattcatcgataaaggtgaattggtaccagatgatgtgaccaacggaattgttgaggaacgtcttgcacaagcagatactaatgtaggttatctccttgatggttttcctcggactcttgatcaggcggatgctttagctgccattactgataaattgaacaaacctttagatggtgtgattaacattgatgttgatcctgaaatcttggctgatcgtttatctggccgctttatttgtaaaaattgtggtgcaacgtaccacaaactttaccatccaactaaagtggaaggtacatgtgatcgttgcggcgaacatgttttcttccaacgagaagacgacaaacctgaaacggttaagaatcgcttaaaggtcaatatcgaaatgaatacacctttacttgattattatgaaaaacgtaacctactttacacggtagatgggaatcaagaaattgatgatgtgttctctgccgttcaaaaagtacttgataccattaaagactagtcatcaactcaagtgatctcacggtcattgttcacgtaaaagcctgactagttgtttaatgacagaattctcagtgcttttaaaaatttaatacttgtgatataatatctcggtatgaccactagcggtgagtgcggagagctctcaccatttttctgtatgaattttcacaaccacaagggggtacttttgcgtggcaaaagatgacgtcattgaaattgaaggtaaagtaactgatactttaccaaatgcaatgtttaaagtagaacttgaaaatggtgcagttattctggcacacgtttctggtaaaatccgtaagaactacatcaagattttacctggagaccgtgtgacagttgaattgtcaccctatgatttgactaagggacgaattacgtatcgctttaaataggcgtaaggatcatatcaaggaggtcagtcgatatgaaagtaagaccatcagtaaaaccaatgtgcgaacattgtaaagttatcaaacgaaaaggccgcgttatgattatctgcgcagctaacccaaaacataaacaacgtcaaggttaatattaattaagcaggaggtgcaagaatggcacgtatcgcaggtgtggatttaccacgtgataaacaaattgtgattgctttaacttatattttcggtatcggaaatacaactgccgttaaagtcttggctgatgctggcgtcgcagaagacgtccgtactcgtgatttaacgccggatcaagaagacaagatccgtgcagcaatcgacaaagttaaagttgaaggcgatcttcgtcgtgaagttagcttaaacatcaaacgtctacaagaaatcggttcttatcgtggcatgcgtcatcgtcgtggattaccagttcgtggtcaaaacacgaagaacaacgcacgtactcgtaaaggtaagaaagttacgattgcaggcaagaagaaataatcagtaaaaggaggttataatttatggcaaacaagaaaaatgctccacgtaagcgtcgtgtgaagaaaaatatcgaagccggcgttgcacatattcactcaacatttaacaatactcttgtgatgatcactgatcctcatgggaatgctgttgcatggtcatctgctggttcattaggtttcaaaggtagtcgtaagtcaacaccttttgctgctcaaatggctgcagaagctgctggtaaagaagccatggaacatggtatgaaatctgttgaagttgctgttaaaggaccaggttctggccgtgaagctgcaattcgctcattacaagcaactggtttagaagttactgctattcgtgacgttacaccagttcctcataatggatctcgtcctccaaaacgccgtcgtgtttagtctgggctacgcttcattttgagacaaactgaaacgtgttcacgtataaacacttctcgttttgaaaggggtaaaagataagaatgatcgaatttgaaaaaccaaacattacaaaggttgatgaaagtactaactacggtaagttcgttgtagaaccacttgaacgtggctatggtacgactttaggtaactctttacgtcgtattttactcgcttctttaccaggtactgctgtcacagatattcaaattgatggtgttttacatgaattttcaacaattgatggcgtcctagaagacgtaacacaaatcatcttgaatattaaaaaattagcacttaaattgcatgttgaagaagacaagacaattgaaatcgatgttaagggtccggcaacagttactgctgctgatatcatttctgatgatgacgttgaagtcttaaatactgatcaatatatttgtacagtagctgaaggcggcaatttccacgtgcgaatgacagttaaaaaaggccgtggttatgttgctgctgatcaaaacaagtcagacgatatgccaattggtgttttgccaatcgactcaatttataccccaatcagtcgtgtcaactatcaagtagaaagtacacgtgttggtcgtcgtaacgatttcgacaagttaacacttgatgtttggacaaacggttccatcagtcctagagaagctattagcttagctgcgaagattatgacagagcatttggcaatctttgtagatcttactgatgaagcgaaaaatgctgaaatcatggtcgaaaaagaagagacacataaagagaaaatgcttgaaatgacaattgaagagttagatttatcagttcgttcatacaactgtttgaaacgcgctggaatcaacactgttcaagagttaactgacaaatcagaagcagatatgatgaaagttagaaatcttggtcgcaagtcgttagaagaagttaagaacaagttatttgatcttggcttaggcttacgcacagaagaataaactgataagaaggagggactccattcatgagttatcgtaaattaggtcgcacaagctcacaacgtaaggcaatgttacgtgatttgacaactgatttaatcatcaatgaacgtatcattactacagaagctcgtgccaaagaaattcgtaaaacaactgaaaaaatgatcactttaggtaaacgcggtgatttacacgctcgtcgtcaagctgcagcattcgttcgtaacgaagtagctgatattcgcgaagaagacgatgctgtaatcgttcaatctgctttacaaaaattatttagtgacattgctccacgttatgctgaaagaaatggtggttacacacgtattcttaaaacagcccctcgtcgtggtgacggtgcattaatggtgattattgaacttgtttaatcacaaaatgatttaggtcatttgatcgatgagacagggcgttatgatgatggaagtactccgagtctagtcctaaggtcatactagcaacacagtatggctttcatcgattgatgatttacataaaataacgtctaattccgagttaaatcggagttagacgttttttgtgttggatatcctttgaataaagggtgactaacgaaagcgctatggccttttatatgataaaataggaacaggtttttgatttgaaacgtgcatggataacataaccaatgcactttaattccaaggaaaatacgggttattaatcatgaatgagcaaaaaataattcaagttgaacatttaaaatatgaatacccacaatctgaaggacatttagcactgaatgatctttctgtcagtatcaatgccggcgaatgggtcgccattatcggtcataacggtagtggtaagagtaccttcgcgaaatcattgaacggtttgttagatttacaatcgggatcagtgacgattgatgggttaccattgtcgttggataacgtgtggactattcgccagaaaattggcatggtttttcagaatccggataatcaatttgtcggtgcaacggttgaagacgatgttgcttttggtctcgaaaatcaggggattccgcgagctgaaatgattgaacgggttaaagacgcggttgaacgtgttggtatgagtgaatacttgaaacgtgaaccaagccgtttgtcgggtggccaaaaacaacgagtggccttagcagggatcatcgcacaacaacctgagattctgattctcgatgaggccaccagtatgctagatccaaaagggcgcgaagaagttctcgcaaccatttataagttaaaacaagaaacaaacatgaccgtgctatcaattacccacgatattgacgaagccgcaagtgcggaccggatcattatcttagataaggggcaagtgcatgatcagggcacaccggccgatatttttgcatatgggcaacgtttgcttgatttagggctagatgttccatatccagaaaaacttaaagcagcgctaaatgaacgcgctatcgagatgcccacagattatctcacaacggaaaggatggttgagtacttatggacattacattcaaaaatgtaagctacacttatcagccaggcacgccttttcaagggattgggctagaaaatatcaatgtgaccattccaagtggctcctatacggctttgattggtcatacaggtagtggcaagtcgacattgctccaacacctcaatgcactcttaaaaccaacgagcggcgttgttcagattggtgagcgcgaaatcacgcctgagaccaacaacaaaaacttaaaggctgttcgtcaaaaagttgggatggtttttcaatttcctgaaagccaattatttgagtcgacggtgcaaaaagatattgcttttggtccgcagaacttcggtgtccctgaagctgaagcacttgaacgcgctaaagagatgattgaactcgtcggtttacccgctaacgtgattgacaagtcaccttttgatttatctggtgggcaaatgcgccgcgttgccattgctggtgtgttggcaatgaaaccggaagtattggtcttagatgaaccaaccgcggggctcgatccagttggccggcgtgagatgatgacgctttttgaaaagttacacagtgagcaggggatgacgattgtgatggtcacccatcagatggatgatgtggcgaactacgccgacaacgttatcgttttggaacatggcaagctagctaagaccggagcaccacgcgaaatttttgcggatccggattggttaacggaaaaacaacttggcttaccaacaacgactcagttcgcgcaagctttaatgcgacaaggctttgtctttgatcaagtaccactaaccgaacatgaattggccgccttattagcggaacaactaccgaagaaggcggggattggacatgaataaattaattctgggccgatatatccccggtgattcagtgttacaccggatggatccacgggcgaagttattagccagtttttattatattgggatcatctttttagcgcgtacatggcaagcctatgctttattactggtctttacgttagcgctaatcgggatttcaaaaattaaactcgacttctttattaaaggagttaagccgctgttatggctaattctatttacagtgctcttacagattttcttcacccgtggtggtcatgtctattggcagtggggatttctgacgcttacccagtacgggctgattaatggcgtctacatcttcatgcgctttgtattgattattttcatgtcgactctcctgacattgacgacgccgccattgtcgttagcggatgcgattgaatcaattctcaagccgcttaaagtagtccattttccagtgtatgaagttgcattgatgctatcaattgcattgcgctttgtaccaacattgatggatgaaaccactaagattatggatgcgcaacgtgcgcgtggggttgattttggtgaagggaatttattccaacaaatgaaagcaatcgtgccgattttaattccgttatttgtcagcagttttaaccgcgcggatgatttagcaacggcaatggaagcacgggggtaccaaggtggcgaaggccgcagtaagtaccgaattttgaaatggcggacaagagacaccgtggcatttatcacgatgggccttttaaccgtcgcacttttattcttaagataacgcaaaaaggactcagtcaaaccaacggaggttgatttaattgagtccttttttttgcacttttttgattagcttgttttttgaaccgacgtttcaacgttgaagcactaatgccagtttggtaactaatttgagcgtacgtaaagccctcttcacgcatgtctagggctgcttgtatgttcatcatcagtataggtcgttttacgaccttcagtgtaactagggttggtgacacgagcattatgtttcccttcctgggtacgagtgagaatcatatcgcgctcaaattgcgcaaaagcactaaataaggtaaaaatgagtcgtccggaaggggtatcttcaatgatgcccatgttcaaaatatgaattttaatgcgggctttaaaaagttcttggatgatttcaagtgcttctttggtatttcttgcgaagcgatcaagttttgtaacaacgatggtatcaccacttgaaacccgatctaatagttcattaaatttagggcgatcaacggtagttccggtaaacttttcgctgtagataatgtcacagctttcttcctttaattgactaatctgggttgctagactttgtccggcagatgaaacgcgtgcgtatccgaacttcattgcacaattctccttatttctacttataataataattatacagcatttgaacttgttttatattaaaaatgcatttttaaatcaaattttttacgaacattcataaaaagattgctacttttcagaaaattatttagaatagaactactaactttttaacacaagagggataaaatgacacaacggtatcgcgtaacaattgcctatgatggaacggattttgcgggtttccaagtgcaaccgaaccaacgaacagtacagggcacattagaaaaagcactgacaaagatgagtaagggtgcttatattcaagtgtatggttcagggcggacggacgcaggtgtccatgcaacggggcaggtggtccatttcgactatccaggtcaattacccgctattagtatgttacgggccttaaatagcctcttaccgcttgatatggaggttgtggatagtcagttagcggatgatgactttcatgcacgattttcaacggtcggtaaacggtatatgtatcgggtcgatcttgggcattatacgaatccattcaagcgacgttataccggtcattatccgtatccaatcgatgtggaacggattcaagcggcgctgccagatgtgatgggcacgcatgattatacgagttttgcggcttcaggtggggtcattaaggataaggtgcggacgatttatgatgcgaccgttgttttcaatgaacccgaaaatgaactcgtttttgagttttatgggaacggctttttgtataacatggtgcggatcttggtcggaactttattagaaattggtaacggtcggcgggatgtccacgattttttacggctgtatgaagttaaggaccgtcaacaagctcgctcaaccgcgccagcaagcggtttgtaccttaaaaaagtttattacgaaactgatgaaaataattgagattcaattgacttaatcgtgaaattacgatactatagtatctggtattgtttgccccacgataggccccggaaacttattgagtgtcaaacaaacacagaatattggaggaataaatcgtgcgtacaacttacatggctaaaccaggcgaagtagaacgtaaatggtatgtgatcgatgcaactgatattgcattaggtcgtctatcaactgtagtcgcttctatcttacgcggtaaaaataaaccaacatttacacctaacgttgatacaggtgataacatcatcgtcatcaacgctgaaaaaattaaattaacaggtcgcaaagcaaccgacaagttatatcatcaccatagtaaccatcctggtggtttgaaaactcggactgctggcgaaattcgtgaaaacaacccagaacgtttaattgaaatgtcagttaaagggatgttacctaagaactcattgggtcacaaccaattcttgaagttacacgtatacgctggtggcgaacacaaacaccaagcacaaaatccagaagtcttagacattacggacattatttaaggaggaaactatagtggctcaagtaacttataacggtacaggccgtcgtaaaaactcagtagctcgtgtacgtttagtaccaggtactggtaaaatcactatcaacaacaaagacgttgttgattacattccatttgctaacttgattttagatatgaaacaacctttaacaattactgaaacaacagatagctatgatatcttggtaaacgttaatggtggtggattctcaggccaagctggtgcaatccgtcacggtatttcacgtgccctattgacagttgaccctgacttccgtccagctcttaagagcgctggtatgttaacacgtgaccctcgtatgaaggaacgtaagaaaccaggtcttaagaaagctcgtaaagcttcacaattcagtaaacgttaatatcacttttatatcaatgtttacaagcacctcgcaattttatattgcggggtgtttttttgtttttgacaccatcggaatttttaagtgtaagcctaatgcgccatcccagcctattcccaatatttttgctatgcttagagtaattgaaggaggcttttttatgtatcgttatgccgttatttataatccccactctgggcacaacaatggtgagtcggttggtcagaaaattgagcaggcactcatcaagaatcaacacaaggtcgaactgatgccgacggaagggccgaaagatgcaacgcggttagctaaaaaagcggcgcgggcaggctttgatgtggtggtcgctgtcggcggggacgggaccattaatgaagttgttagtggtcttgcgacgttagatcagccgccttatttaggcattgtacctgctgggaccgtgaataatttggcgcggatgttacaaatcccgttggacattgatcaagcgattgaaaatctgcagcaggttcatctgcgcccactcgacgtcggccaagtgaacgatgattacttgattagtacaatgacattgggcattttggcggacgccgcgttgaacgtgactcagagtgaaaaacaaaaatgggggccgctagcttttttaagcaaaggcatccatgcattagcggagcatcagcattatccactaacgattgaaacgcctgatcggcactggcaaaaagacacgcaattcttgctggtgaccctcacgaattccgttggtggatttaccaacttcaatcccgaagcgcaacccgatgatggttatttccatgtcttcgttgctccgaaaatgtcgctagcacggtcagtgatgtttctcccttatttcttaacgggtaattttaaaaagattcccgggatgacttactttaaagcgaatgaaatcagcatcacagtcgacaatcagcaaagtgcacaaacccgcattgatggtgatccgagtgccaagtcaccattggagatgcgactcttagaacataagttgcaagtgattacgcctaatccggatttataagatcaggggaggttaagatcatcggtaaaataaaaaagaattcaaaattttctaacgaaaattctgaattcttttttttaattattgcgttaattcagcttgtttggccgcaacgcgttcactaatcttcaggaatggccagtagattagaacgccgaggattaaagtgaagccttgaatcacaggggcgcgccaatcgccgccggttgctaaataggagttgagtaatggtggtgtggtccaaggtaccatgacgactactcgattcatccagccaattgcggtgaagaagtaggcaatactgatgccaagtcctggcattaggacaaatggaatgatgagcgcaaagttgaagacaattggataaccgaaaataacaggttcgttaatgttaaataaacttgggacgaatgatagctttgtaatatcacgactagcgcgtgattttgagaagagcaaggtcgcaatcaataaacaaatagtactaccggtaccaccaagcatcccaaatgtatcgcggaaaacgttgttgatgatataagggatgtgttgactagctgcgtaagctgccatatttttgttcatgttgatcagtaagactggatccaataaagtaccgttaatgacagcttgatggatcccaaatgagaagaggagattaccagtcccgtaaatcagaaggagacccggtaaacttgtattaacgcgccgaagtggttcttgaatcacatttgtaattaaagtgatgagatcagtgtggaaaccagccgttaaaatcgcagcaagtgccgcaaatagactcatggtaatgagagctggaatcattgtgttgaaagaaccagcaacagctgatgggacggcatcactcaagttaatctgtaattttttaagctttgaaagagtcataaagagttctgttgcgactaaaccaataataatgccggcaaacattccggttgttcccacgttttggaaagttaagacgccagaaacttcgacggctttcttggcagctagtggtgtgattggaacagtattaggcatcatgatgattaaagtccctagtgccatgacagccgcggaaattttgttgacgtaattcttattacgtgctaaacagtagccgattgtgggtgcgagtaatagcccagcaacgttcaaagtcccattggtaatgtaagtgccgaagtattgaaagttggttagcatttggccatggaggacccaagggaatacaacgttattcacgagcaccccaattccggcgaggatgaatagtggcataataatcgcgaaggcatcacgtaatgaacgcaaatgcacttgattcccgattttaaaggcgatatttgtaaactgatcaataaatctttgtcgccgacttccttgtttaagcatagaaaacactccttttaacgcactttttttagtctaattgttcaccgttagattgaatgactttttgcagccaataaaaactagccttcggaattctagcaaggtctttgaggtcgtgattggttcgattgacataaacgacgccatagcgtttattcatatcaccttttgaacttgggatgtcgattaacccccaaccaagatagcccacaacgtgagcgccgtcttcatcaactgcgtctttcaaagcctggatatggtcgcggtgataggcaatccgttcgtcatcttgaatcatttcatgattcagcgattcttcgcgaatgccaatcccgttttcgatggggaagatggggaggccagtttcattcgaaagttttgttaagacgtttctaaaaccgagggcatcaatctgccagccccattcgctactttctaaataaggattagggacactcgcatcgcgcatgtaataattgggtggtgtgttgggtgttaattttgtgtgatcgagtgcgacagtgtagtagtaactgaacgctaagaagtcgttgtgatgacttgcaatgagcgctaaatcaccaggctgaatactgctcattaagtcatgattttgcatatattgcagtacttcggctgaatagtgaccttttgtaaaggcgtcaacgaaatgttggttgataaattctgatgcttttctagcagcaaagatatcttggggatgactggttgcaggatagaattcttgataggctaacatcccaccaatttggtcattagggtagtgggcgtgtaagtaattggcgatttcagcatgcgcaaccattgtattattagcgatcgtataaagggttaataagtcgcgctctccgttgataaagccagtattatcaaagccaggttcaaagaaaaaaccattttgttcattaaagcttagccaatatttgacttgttcaccataccggtcaatgacagccttagcgaacttagtgaatgcttgtgtgacatacagacttgagaaaccattatatttttcagcaagatgcaaaggcatgtcaaaatggtacaggcaaatcatcggttcgatgcccgctttgagcaaagctgatatcaatcgatcataataatcgaatcccgctaaattaatttcaccatcaccatttgggaaaatgcgcgtccatgaaatttggaaacgatagcagttcatacccatctgttgcattaaatcgatatcttcttgataacggtggaattcatcaattcccactttccaatccgataaatcagctgtctcaggtttcacatcgtacactgataaacctttaccatcagcatcccaggcaccttcactttgcatacttgatacagaattaccccataaaaaatgtttgtctaacgtcatcatggtacctccatcacttgaatgattttatgatagcgcttttaatgtaacttgtaaagtcatattttataatttgaacaacgaatattccgaatctgaatatgctataataaccatatcaaatggtaggtggttactatggcaaagtataaggatattgcggcaacgattcgcacccgaattttagaaggacaatattcagctgatggtccgcttcctgaacagaagaagttagcccaagaattcgaaacatcgagaatgaccattcaaaaagcactcgaaatgctaacttatgaagggctcatttatagtgaacaagggcgcggtacgtttatcaaatcaaacgtctccgcgctatcacaattagatgcgactgtgaatcaatatgtagggacgactaagctgtttgccggaaaggccacagtaaagagtgacattctaaagaatgaattgcgattaccggatgcagaagaacaagaaaagcttcagttagctaaaacagaagcggtctatgacgttgttcgactccggtttttaaacgaagtaccctatagtattgagcattcgatcatgccggctaagattttaggggaattaacagacgcagtacttaagaagtcgatctacgaatacttggaacaaacattgcatctaaagattggcgtggcttaccggcgaattagtgccgatcaaccgaatcaaatggatcaagaatacctgcactgcaaacccgtcgaacctgtcttacaagttacccagacagtctttctacaaaacgggctgccttttgaatactcaaccacacgacatcgatatgatatggggagtattacaaccattacacaagggaatcattaataaaatgacctcactcagttaatgagtgaggctttttttgttgcattgatttgaagttgttgacaaaaattcatatcaatggtttaatggtttaaacttatgaaccattaaaataaaaccggagattaatgtatggatgaaatgaaggttattaaacagagctttgctgagctgagcccgtttttgacggcgcttggggatgagaagcggcagagtattattttagaattgatggctgataaagcttgtgatggcttacaggtcacggatttaatggcggcgtcggacttgtcgcgcccggcagtgtcgcatcatttgaaagtgttgaaggaagccaacttggtcgactttagacgcgaaggcacgaagaactattattacttgcaacacgaactgggcgaaatcaatcaactaaaaacactgctggatcagattacggcagtcatcgaaaaacaacagtaaaaggagtttttaaaatgcaaaccatcttaggtagtagcggtcagattggccaagagttagccaaggcacttcataaggacttcacaacggacattcgactggtcagtcggaatccaaaaaagtgaacgcgaacgatcaactatttccagcaaacttgctcgacgccgcccaaactgatcgtacggttgcaggcagtgaaattgtttattttaccgctggcttaccgatgaattcagacatgtgggaagcacaatttcacattatgatgactaacgtgattaacgcgtgcgtcgcgcacaaggccaagctcgtctttttcgataatacctatatgtatgcgaaaaatagcacgctccagacagaagcgagtccttttgaacccgttggccgcaaagcggttgtccgagcggagatcgcacagttgttacttgataagatggcaactggcgcaattgaagcggtcatttgtcgtgcacctgaattttatggcccaggcaagacgcaaagcattacgaacacaatggtctttaacaatatcaaggcgggcaaaaaaggtgcgcgtgccattgaatgatcaagcggttcggacattaatttggacgccagatgctagtcgtgcgatggcgttgattggcaatacgctggatgcgtttggtcaaacgtggcacctcccttgtgatgacggtaaaacatacgccgaaatcatcgcgctagcaggcaccttaacgcatcaaccaatcgactataccgttttaaaaatgtggcagttcaacatcggtagctggttcagcaaaccgctaaaggaattaaaagaactcctacctagatatgaagtagataatctgttcagttcagacaagtttaagaaacggttcccagaatttaaggtgacgacgattgaagaaggggttcaggagattctttaaaaagtcagcctttcgctcgatagactaaccattgttcaatattatataatcgctttaaagtagcgatgttagtcaatcagataaggagcgtggcatgatgaagaaaccttttaataagcaacaagtgaatggtgaaccaaatccggaatttgattccttctttgcggaagtcttaaagaagttgccgcaacaatcggcagctgtgattgcgaagtcttttaaccagtccaaagcattggcggaaaagacgatggcgaagagtcggacacagtttgatggggtctttgaagacttcctagtcggtgtggatgatcagatgcgtaaaaaggcacacaatatcattcacgcagcatcactaacagcagcgattattggctgttcaccaattccattttccgatgcgttcttgttggtgccggttcaattaacgatgatggcgcgtttgcataaactattcggtcaatcttggtcggctagtttgggcaagagcctgtcgaaagaattggtcctcgttggcctaggtcggagtgcagtcggtaacattctaaaactggtaccggtcgttggaacggtcaccggagccgcggtcaatgcgaccgttgcgatgtcgattaccgaagcgctcggctggttaacggtcaagatgttgaacgacggcgaggacatcttcaatgatgttgtttcatttaaaaatcaattcagaacgctatttggattgttacggcgtaagtagttatttttcaattgacagaataagaacgaaatgatttaataaacccacatcactaatttttaggaggctaaccaggtgcccaaagtactaattgtccacacgaatgttacgcgttatcaaggaaccaccgatccaaccggattatggctgggggaatccgcagagttcgttgatgaattgcaaaaagcggggattgattacgattttgtcagccctaaaggcggctttgtcccgcttgatccacgggggatgaagtacacggatgaatcaattctgaccatctatgaacaaccggattacgtgcaacgggggttagtcgcaacgctgaagccaagcgatatcaatccagctgactacgctgcgatttactatacgggcggccatggcgtgatgtgggattttcctgataatccagaattacaaacaattgcccgggaaatttataatcacggtggctatcttgcgtccgtttgtcacgggatcgcgggtttactacgcattaaaaatgatgacggtcagtatctgattgctggtaaaaaagtgactgggtttaccactgcagaagaaattattgcgggcaagaaaaaagtggtgtcatttttaaaccaagaagtggcaactcaaaacggcgcgcaatttgtgcaaaaacggttttacaaaccatttgctgtccaggatggtcagttgattacggggcaaaacccgttttctgtacgagaagtgacgaagcgcttgattccggccctacaaaataacggttaggcattctttgaattctatgctaatcttatagaatgtagaaaagttaggagtcagaagatgagtgaaaaacaaacaccaaaattaacgcaaaaagaaaaaatgcaagcactaattgatcagaaaaaaggtggcggcagatcaaaacagaccgacgttgctaaaaatgatcggacaaagatgcgcaaagggccaaagatttttaacgaaatccactggtaaagagtgcgtttggttgcggttagcaactgagcattaagacaaaatccgcagtaatccaggttttaggagtactgcggattttagcttaagcggaagttgttgcaaccaaaaagcacgtttcaaacaaagtgcgtttgaaacggtttggttctgagcattaacctaaaaataagcactatggcggtccttgccatagtgcttattttgtagttaagcacaggagccagtttcaaaaagcacgttttagggctagggcaattttgcgctagccctttttgtgttaacgcgctatgctagaagcaacttattttaaatcgaatggagtctttgtatgtcatctttaatcgaacaaatgcaacaccatggttcagttcgtgatttcgagccaacacccctcagcacgacagtgaaacaacaactcattgcggcagctcaaagtgggtcttcttcgaatttcgttcaggcattttcaatcattgaagtgaccaatcccgtaattcgtgatgaaatcgcaacgatttctcaaagtgcggcgtacgttaaacagacggggacgttctatgttttcgtcgcggacttataccgacaagccacactcttagaaaaagcgggccagtcattagctggcattcaaaatatggaagccttattagtcgcaacgatcgacacagccattgcagcagaggatatggcagtcgctgccgaatcgttagatttaggcatctgttatatcggtgggattcgcaatgacattgcgcgtgtcgctgaactactcgggttgcccgcctataccgtcccactatttgggttaacggtcgggattccgaagactaaaaatcaggttaaaccacgattaccgcaagttaatcaagtcgctcaaaatcaatatgatgtgcatcaggcaaccaatttagtgcaatacgatcaacaaatgcaaaattattatgctaatcgtgggaccaatcagcaacaaactgattggtcgaccaagaatacggccttctttagtgaagtgcgacgaccagcagtggcgagttttttgaaaaaacagggctttacgttgaattaagaaaaaatggtacttatcttaaaggacaatcagttttctgattgtcttttttttgtgtcgtgcaagctcggatatgcgataataaaactagtcaaatgtaaccggttaaataggtataggagtgatcgttatgagtttaattgatgtacgacatgtagccaagcggtatcagatgggcgagacaacaatcgtggccaatcgtgatattagttttacagtcaatgaaggggagttagcggtgattctcggaccgagtggtgcgggaaaatcgacagtgctgaacatcttaggcgggatggatacacccgatgaagggcaagtgttgattgatggtgtcgatattgcgcagtttagtgcgcgccaattgacggcgtttcgccggactgatgtcgggtttgtgttccaattttacaatttagtgccgaatttaacgacgcaagaaaatgtggcgctggcaacggctgtctcgccgaatgccttagatgttgcgcttgttttgcaacaagttggtctgcaggatcggcttcagaattttccggcccaactatccggtggggagcaacaacgggtggcgattgcgcgggcacttgctaagaatccgaagctcctcttgtgtgatgaaccaactggcgcactcgattatgaaacgggcaagcagattcttaaattattacaagaagttagtcggcagcagcaccggaccgttgttttgattacgcataatgccgcgattgcccagatggctgatcgcgtgattcacattaatgatgcgcgcgtccgctcaattgatgtgaatcccaacccacttccagttgaaaagattgaatggtaggtggctaatatgcagacacgtttatatttacaaaccacattccgcgatattcggcaggcgattggacggttcattgcgattatcctgattattttaatgggtgtcttattgtttgtggggattaaatcgattggcccgaacttagaagagactgtggatcattttgtcaccacgcaacgcgtatccgatttacagattagtgggaccgctggcttaacggaacaggaccgtgcggtggtcggaaaaatgcatggtgtccaagctgaattgggttatcggattccgtatcgcgatgaagcgcgggatgttaacttacaattatataattaccaaccaactgcacggcaaaatcgcttaacgctgactaccgggcgctatccgcaacgaacgaatgaaattttagtggataacgcggttaagacgcattatcgtctggggcagagggtgacgattaagagtcagcagctattgacgcatcggtttaaagtggtcggttatgtggactcaccgttatatatcgaccgtcaggaacgtggaaccgtgccagtcggggatggtcagctagatggctttatgtatttgccacaaaaggcatttgcacctcaaccgtattcggtgatgatggtgcgctttagtgatttggatcgccacagtagctttttacaggcttatcgcaccgacattgcgactaaagaaacacagctcatgcgccaattaaaagcacacacaactcagccacagcaacagtacttattaactgcgcgcagtgctaatccgggttttaatgaatttacgagcttgtcggatcgcatcgatgcgataggggatgtctttcctgtcttctttttcttaatcgggattctaattacctttacaaccattacgcgaatgatcgaagaaaatcgcaaggaaatcgggacattgaaggcactaggctatcgtaattgggaaattgcgcagaagtatttactatatgcgctactaacaggtagtatcggcaccgtgcttggcaccattttgggcacgaagttattaccgctagtcgtctatcgaatccaaaaaccggtctacacctttgcgcattatccaacccatttttggacagctccaattttattagccattggagcggtcttgattgcgacagttggggccacggggtatgttttaatccgcgatttacgcgagaagcccacccaattactccgaccaaaagcgccgaaaccaggccaacggatttggttagaaagaatcacaccgctctggcggcgattgagtttccatcaaaaagtaacttatcgtaatctttttcgctataaagcacggatgattctgaccatcttaggcatcgctgggtgtaccggtttaatggttgcaggctttggtttaaagacgtcaattggcgaagttgctgaccgtcagtttaagcaattgacccattaccaagcaattgtgacgcttaaaataccgaatagtacagcccaaacgaagtcgattttaacacagactgagaaggttcggtcttacttaccggtcacaatgacccaggttaagttcaagcaaaaagggattacggatcaagcggcgacagtctatgcggtcgctgatcaagcaaaaattgcacagtacgtcgctttgcaaacaccgcgagaacaacaacgactcacattgccgaaacacggtgcgattattgctgcgaacctcgctaaaacatatgctgtccaaaaaggcgattggttaacgttgcaaacggcacaggggaaacgtgctcgcattcaagttgcagggatcagtgaaaattatctcggtaatagtgtctatctccgccaatctgctctttcaaaaacgctacaacaaccagttgcggataatgcctatctcgtgcgcaccgctaagatgactaccaagcaagaaaaacagttggcgactcgtttgcaacaaacaacggaagtggcggccacaacgtttatcagtgatcaaggggctaagcaagcaacggctagtgctaatttagacccaatcgtttttattttcatcgggttatcagcggttttagcgtttgtcgtcttattcaaccttactagcatcaacgtttcagagcgggaacgtgaattggcaacgattaaagtcctgggctttttcgacaaagaagtgacggcctatattgtgcgagaaaatgtaatcttcaccgttattgggattgtgcttggctttggaatcggtaaattgctgacttggttcatcatcacgatggcctcgtcagaacaagtggcctttccactcatcattccagctagcggctacctgattgcggcagggatgacggtgctattttcactgattgtgatggggatgacccatcgcaagttaaaagggattgatatgattggtgcattaaaggagaacgaataaaagttttagcaaataatgcttttttacttgcttgtgacgttacgtcatcggctagtatcaaggtatggaggtgatattctatggcgcaatatacaacaggtgaactcgctaaattatgtaatgtttcggtgcggacggtgcaatactacgatcaggcggatttgttgaagccggcaagcttaactgaaaatggacgacggctgtatggggatgcgcaagtgcagacgttaaaagtcattctaggctacaagcagctaggcttttcactgaaggcaattcaaaaagtgatggcgagtcaagcttcgacggatacactggcattgttagtcgaacaacaactcaatcagttagtccaaaaagaaacagacttagctaaccagaaagcagcgttgcagtttgtactgcaatcgattcaaaatactagcgcggtgccttttgaaatgacaatcagcgacatagaagacgcaatggctaaaacaacacagttaaaaagattacatcggcgaatgctgatgtggggcttattgattgatggtgtggaaattggcttattaattcttgggtttctaagtggcatttggtggccaatgtggattgggataccggtcatcattgcgatggccatttatgtgacaacattctactatcaagaaactgtctatctatgtcccaattgcaagacggtcttcaaaccacgcctaagtaaaatgttctttgcccggcacacgccaaagacaagacaactagtgtgtccaagctgtggacaaaaaaattactgcatagaacagagtgcgtaagcaggcgttcgtatttttaggattaactggatttgccgaattggcgacgcaatcgctaatttggcaaatttggttagccacagaaatatgcctgctgaagcacgtttaagaacagagtgcgtttggtcgcggttagcaaatgagcattaagacaaaatcaccagtaatccgtttttggagttactggtgattttagcttaagcggaagttgttgcgaccaaaaagcacgtttgaaccaggtgtgcgcatcaaacccaaaaccatctaagctgggacgatttcgtctcagtttttttgagtcagatactttataatagaagtattacaaaaataaggaatgatgcaaatggaaacgacagtgatcatctcgacgctctttcggttggcaaaagtcttcgatgacatgggtaagttattgttcaaagcgcatttagatgtgccgttgacgtttgaccgtgcgcaatcgcaggccttattacggcgcaataaccgactagaattcagctatcaacaacttaaaacaagtaaaacaaaactattaaatcaattattggcgacggcgggagccgatccctatttgtggaccaagttacggcgactgcaggcattggatgtggcgagtttggcagccgttcaagcaaatccgcaatttaaccgccaacgcaagattaatcgtttgaaacaactgattatcaatttacaaaatgaaaaaatcaatgagagtacggtactgacgaagcaggcgctcgcctatttataccatgtagcccctgataaagtggcggccacgagtaagccaggaccgatactggccgatccgtttgatagccgcgcttttaaaatggacatgatggcccttaattatttagatcagtattttaacgtgcaggaattgcaatattacgtgaagtacctcgtgtttattcacgcgcatcaagcggcggaagcggtgattcactatgacgcgcgaacggttttgccgaatgcggaacaaactggcttttcggcagttgcctattacgtcacgcttaatcgccaatcgtatacctacatttcctacaaggggactgaggggacgatggatgatccgcggattaagtcgtttacgcagcggctggataattatgtccgtgagagttatcaagattggaagtataatattgatgcgatgctaattggcaacaccgaaaatgatgagcaactccaactcgcacggcggtttacgcggtatgtggtccggcgggtgcgccgaattaatccggcaacaatcatctatggactgggtcactcactcggggggcattttgtgcagacggtccaattattggatgaaccgtttgatggtggctataccttgaatgctgccccggttcagttaaaacaaataaagcattatcggccggatcttttatccgcttcaaaatggcaacaattattcgcattgactaagcacaacaatacgcaagatccagctgtagcaatgcaagtccacgcgattttgggacataattacgctacaattgaaaatgaatggttcattaaagatttaacgcggatctattttggctttccgtatacgttctacattgggacggcgcgttatttgaatgctaaaaattggcattacccgtttgtgactgacgtagcaccatatctccgaaaagatgagattcaggcgtatagccagttctggggtaatctaattcgctatttgaaacgtgttgagactagaaatgggtcgttgatgttggcaagtctgatgacatatggactgcagacactccgtgaagtgtatgccgcgattaaaacggaacaggcccaacagatttttgcggcatatgcgcgctatttatacgatgcgcatatttttaaagacacccccgttcaggtacaggccaattttgaacgggaattatcacggccgcgcacggtactccgtgtgttacaaggcgaatggccatttttaaaaagcgtcaacaatgagatggtcgaaacggtgattttcttccacacgattgaaggcgctcaatactttacacgctagacagatgggatgttaactaatggatatttatttgaaacaagcaattttacaagtggtcgaccgcgaactcggcgatccaatttactcacaacaggtgctagatctcaccaatgggaacacacgcgactatttaaccaacaagattaagaaattatcgtctgcccagagtaagaccggcgtgctacgccaagatgctgagctcgcatcttttctgcgcgatgcgacagctgattttatcggcgctagccaacgcctcgttgaaaaatggtacacggtctatcagaaaagtgacgatgcaccgagtgcggatgcgtttgttgtcttgtatgaacaagatgcccaagcttacttggcttttttgaaggtcgattatcatcaagccttcacccattatgtcaatgctgaagaggggccattgatgaatcaactgatcattcaccaatcgattctatcgaataagacccaaaaggcggatgaggggttcgcgattaacctccagacgtttggcttcgaattgatggagaagaagtacaccttctccggtgaaaagatgacctatttatcaacgaacgtgattgaaagcgaaccagcgccatcgctagaagaaaacgtcaaggtcgttaaaaaggccgctgaaaaaatcggcaagaagttcgaagttgccaaacacgatgtggtcgccaacgtcaaagaagccatctacgatacaatcgaaaccaatggtgaaatcgacacgagccagatggcagcgaagatttttaaagacaacgtttcagcccaaagtgagtttaaagcagaaatgacggaaaacgcgccagcagcaccagcgccaatctcaccagccgtccgcgaaatcgccgaaaagaaatacggcaaacaaaaactcaaactctcaaacggcatcgaactaatcgtcccaatcgacgtctaccaaaacccaaatctatttgaattcatcaaccacccagacggcacaatgtcggtggagattaagaatgtagaagaagtgattagtagattatagagtgcgtaggcaagcggttatattttgagcattaactggatttgcccaattggcgatgtaatcgccgattgggtgaatttggttaagtacagaaatatgcttgccgaagcacgtttagagtgcgtttgaagcgggtcgactttgaggattaacctaaaaatgtgacttatgacgggtttggtcataagtcacattttgtagttaaccggaaaagccagtttcgaaaagcacaccaaaaaagagcatttctctcatcctatcgagaaaaacgctcttttactatgcctttctttttgcccagattaaacggataatcttatcgaattccgtgatgattagaatcaagaagcctgcgccgatcgaaacgccccattctaataaggtaagcggttcggtgtagaaggtttgttgcatgaatggcacgtaggtcaggatcaattggagaataatcatcagtgcgataatgccgaatgccttttgattggtgaagaaagcttttgaaaaggcgagtttcgcagtccgaatattgaacaagtagaaaatcttgctgatgacaatgatattgaccatcattgtgctggctgtgacttgatcgacaccgcggccgagtaaccaatcgtaggctaacaagccgattaaggccatcaagacggaaacatatgccatttggaaaacatcgtgtttattcatcagcgcttggccggtcttacgtggcttgcgggtcattaagccatcttcagctggttcgaagatgaaggcgaattgaatcgtaatcgccgagaccatgttaatccagagtaactgcgtcgcttgcaacggcatatcttgttgcatcaaaatcgtgaaggcgatgattaagccttccgcgaaggaagtcgggagtaagaagagaatactctttttgatgttatcgtaaatccggcggccttcacgaattgcgacggacattgttgcgaagttatcgttggttaaaatcatatccgcggaatctttggcaacatcggttcctttaattcccatggcaaccccgatgtcagcgcgcttcaatgcgggcgcatcattgacaccgtcaccggtcattgcggtgactttgcgactggcttgtaaggcttcgacaatttcgagtttgttatgtggtgtggtgcgggcaaagacttggtgttctaaagcggcttttggtttttcagcgtccgacaagcgatcccattccggcccggtaatcgcattaatcgttggtgctaagcctaacttttcaccaattgctttagccgtcagtggatggtcaccggtaatcatcttgacatcgaccccagcagcgttcatttcggcgagcgcttggatgacttcatcgcgtggcggatcgataatcccggcaacccctaagagttgaatcccttgttggagttgttcatgggtaattgtagcagtcgttgttggcacgtcgagataaccgaccgccacaacccgtttgccttgttctgataaacgggtcacatcggcattccagtcatcgattgggaaatcgaccattgcctgttgggccattgggaataatttatctggagaccctttgatatagattcggtgcgtaccatcagttagttgcacgagtttagcaatgtagcggtaatccgaatcgaaaggtaacatgtcaatttctgtatttgttggtaagtcgtcgataccatgaaccttatgatataaggttaaaaaggcaccgtcagttggttcaccgttaatggtccaaccattgtcggcttgataaagcgtcgtatcgttggcttcataactagcctctaagaattgtgtgagggtggtatccaattcagcaggttggtcatttaataaaatctgaccttcgggcgcatagccattcccgctgacttggtaagtcgtttcggcggtgataatttcggtcacggtcatttcgtttttagttagcgtccccgttttgtcggtcgcaatcacgtcgacggagcccaacgtttcaacggcaggtaagctcttgacgatggcgtgtttgtgcttggccatgtcgctgacccccattgcgaggattacggacattgttgcgggtaatccttcaggaattgaaccgaccaccatcgtgacaatcgcgattgctaatactgagagtgagtaatgttcgccaagtaagccgaagaggaataaaaagacggccgcaccgatgacgacaaatgaaacgccggtccctaagccgttgatttcgcgagtcaatggggttgggcgggttttcgtttcggtgacagcaactgagatttgcccgatttcggtatcagcggcggttgcgacgaccacgcctaagccgctcccgttagtgacggaagtggaggcaaaggccatgttgacttgatcggcaagggcaacttcttcttcggttaagcgtgttgcaattttttcaactgagtctgcttccccggttaaggctgattcttgaatacgcagattatcggcatcaacgattcgtaaatccgctggtacactatcgccagcttctaggaagataacgtcgccgaccactaagtcttcagttgggatgtcgatccgctgaccgtcacgataaacggttgcttcggttgccaacatttctttgattcgttccaaagcatcagatgcgttcgcttcttgataataaccaatgatggcattaatgatgactactagaccgatgatgatggcatccgaatagtgacccatcatgagtgttaatagggctgcgacgattaggatgtagatgattaagttgttgaattggcgcacgaaaagttgccacttcggggtgtgatggctctcgagtttattcggaccattggttgctaagcggttagccgcttctgtttgcgaaagcccctgttcaaaatcttggtgggcataattggtttgcagttcgtctaatgtttgttgataagcgtgtgttttagtcatggtaagctccttttaattatcgaaagtcaaaatgcggtcgttcgtgatcgttattcttgccgataataaggaataatctgatggattaaacaaaacgcttcgtccgagccgtcatccaaaaatactcacctccagttagttattactctaaaattatcatgaaaaaatagcgatgtcaatctaatgaatactattaccaattcaacgtctaaactttgcgcccagtgtggctttgtggtaatattattacataagttaaaaaatcggttgaagcattgcgcgttcaagatttccttctttagggtggtagaagggaattttggcgtgctttttttatggagggaaatgaatcaatggcaactttagcaattattttaatcagtactttattggcaggacacatgagcaaacggattggaatgccggctgtgattgggcaactcctggtagggattattcttggacccgcgttgttcggtgtcttacatgaaaattcttttatccacacgttttccgaaatcggtgtcgtgttattgatgttcatcgctggcttggagagtaacctgaccttgttgaagaagtatttcaaaccaagtttagtggtcgccgtcttaggggtgattgtcccggtgatcagtatgtatgggatgagcttggcctttggtattagtcaacttgagagtttattcatcggggtgatttttgcagccacctcagtatcgatttcagtcgaagttttacgtgaattaaacgtgttagaaagtaaagaagggacgattatactaggtgctgcggtagtggatgacttactggccgtaattatcttgagtgtcttgaccagtctttttggggcgcaactggctgcagctagttcaacccacatgagtttggggttgagtttattgctgcaagctttattcatggttgcggtctactttagtgtgaaatggattgtgccatttgttatgcatttgagtcgtcgtttgttagtaccatatgcgagcgccattacatcgttaatcatttgttttggatttgtttggttcgctgaggccgttgaattgagtgcggtagtgggcgcgtttttcgcagggattgcgatttcgcaaaccccgtataaggaagagattaatcgccatattgaaccgattgggtataccgtatttattccggtattctttgtcagcatcggtttatcgatgaacttagcaagcttgaatcaacatattctatttattacgattttaaccgtgttagctgttttctcgaagttaattggaagtggtctcggtgcgcgttggatgaataattcgccacaaggagcctatacaattggtgcggcaatgatttcgcggggcgagatggcgttaattatcgcgcagattgggtacaacgctaaattgttgagtgaactttattactcagagattattttcgtgattatcattaccactgttttggcaccgctgattcttaaacacgcggtgaaacgccaattagcaactgaaatcaattaagaaaaatcgtcagctatttgctggcgatttttttttttgcccttttttaaagttgacaaaaaaaggattgagcagtacacttatcacgttaagaaaaacatgtatttaattacattatatgaaggcttttaaaaggacaaaacaatttaaagaattagaagatttcttagggacatatttcatttacacttacgataatgggtggaagtatgaatggtatgcaaagaacgaccacacagttgactaccgaattcatggtgggatggttgcaggtcgttgggttcgtgatcaagaagccaacatcgttaagttaacggacggcgtcttcaagattacttggacagaaccaactgggactgatgttgcgttggacttcatgccaaacgaaaacaagttacacggcatgattttcttccctaaatgggttgaagaacatccagaaatcacagtgacctaccaaaatgatcacattgcactcatggaagaatcacgtgaaaaatatgaaacatatcctaagatgttagtgcctgaatttgccacaattacttatatgggtgatgcaggacaaaataacgaagacgtaattagcgaagcaccttatgaaggtatgattgaagatatttaagaaggccggtatttcgatgctgactatcgcaagattcaaaaataggcaagctgcttaaccaatcataaacatctactaattatgacgataagtaaatagttgattttataaagcggtttcgttataatgaggtcatggttaaataaattaacgaggtgaactggacatggcgattcaagtaggtgatttagttcgcggccaatcaaacgaaattatgtctgcgacgtagatcggtaaggtcattgagaaatgtgaagaaactgtgcatatcttaatcttgaactatgcaccaactgatcgttttacggttcacgagttgatgcaacgaattctagtgaattcacaacaacttcgtgcaatttcgttaacgaaataactccctaataaccatagatttctccctataaaaaaacgaccactcccaagaaaaggtcgttttttttatgcgcaaaaagcggtctaatcacaaaggtggcgcttgcatcttgttgctcgctcacttatagtgaaagataagtgatggcaggaggaatgtgcagtggttgaaaaaagaaagttaattgaaacagatgaaccagcattttatgaattagcacaatatgcgtttaataaaccggatagtgctaagcgccaagaattcttcaaacagttgtatacacatagtgcagggtttggcgtttttgatgacggccggttggcaagtggcttattagcgacgccgtttgacgtacggctcaatgggcaaacctttaagatgagtggcattggttatgtcgcgagttaccccgagtttgcgggcaaaggtgggattgcagcattgatgcaactcgcgtttgaacacatgcgtgcagaaggtgtgacgctttcgtatctcgcgccattttcatacggcttctatcgtcggtttggctatgaacaaacttttgatcagacgcactttgagattcaaacggctgacttaccacgattgaaatttgcaccgagtgcaggacaagtagtgcggatgacattggcgcaagcggtgccgttgattgatgcgttcttcaatcagcatccggacaatcaagtcggtggtgtgcaacggactgattggtggtggcaatatgatgttatgaagcatagtgattgggaagtggcggtctatcgagaagatacaggacgggtcgcggggtatatgatttatacgcgccaaccagagacgtttgtgattcaagaactgatgacctcgacagttgcaagtcaagaacagctattgagctttattcttaagcatcagtcagcttatgcgataattcagtatgagagtgcactgactgagtcgctagctgatttattgcctgatcccacaatcgtaaagacgacaaccgtcccttatatgatggcacggattgtgtcactagctgatttcttcgcgcgttatgcctatcaagtagcggaactatctgcggtaacgattgcggttcaagatgatttcttacctgaaaatgccggtttatggcagttaagtattcatgcaggacaagctgctgtgacaaaattagcaacggggaccgcagacatcaccgttacgattcaaaatctaactaaggcgatgttggggtatcgcacacttgagagtcaagcacactttgggcatgtgcaagggacaccgcagcaaatcgctcaactcagtgctgcatttagtcatacgaaaccgatgttatgggattatttctaaattgaacatcaaaaaaagccaatcatacaagattaatgtttgtcgtggctcttttttatttaactattcttcaattggccaaccattttgtttcagttgttcaacgaatgcctgcttggctttgcgactaaggagtatttgttcgggttggtaatcaagttcgttggttttaattaataaaccatgtttttggacaataatggtcgtagtcgtttcacggttgatggttcgattatatttaaataccggccgtttaagcgtgatcacgtctgccgtcattgaaacacgatgcccgaaaatgacccatagcgtcaaccaaacggcaattaagccgatgccccacgattgccagtttaagttgatgagttcaagttgtacaattaaagctaatgtatagacgaagccaatccaagaccaaatcgtcacgaagtaagcataatttggttggtagaatgcggtggttgtcttttgcatgagaacactcctttttacgctttgtatcataccattaacctgaccctgctgtcagtgaaaggcggtaaattttaagaatgattaaactttatacggacgcagcaactcgtggcaatcccggaccaagtgcggcgggaattttaatcgtgacaccagagcgacaatatcaactacaagcacctttgccagaacagtccaatcatgatgcagaatttgcggcggtcattcttggcttagaacaactagccaatcgggggcttaccacgaaaatactacagattaacgttgacagcaagcttgtctttcagagcctagaaaagcggtatgctaaacattatcaagctgccgtcgaccggattctagcacttgaggcgccctattcaatggtcatccaccaatggattccagagcgtcagaatcagggggcgcaccatctggcccaacagggattacctcatttaactgactgttgataggcttaactagcgctttgagcgtgattttagtaaaataataagcaacgctagaattttggaggagtacgatatggttttagttacagaaataatgtcattcatcatcttcattaatgccttattggcaattattacaattctgagacagccccgcgatattgcggccacctgggcgtggctgctagtcttaattttactacccgtgggcggttttatcctatatatgtttaccggacggggcttatcgcggaaaaagattttccaaagtcaatcgcaaatcgatgatgggctttccgcattggtcgacattcaacgtaaggaaaatcgtaaaaacgacctcttaccgaaaaagatgctttccagtgaagcatccgaaatggtgaatctctttttaaatattaataatgcacccgttttaaagaataaccatgtcaaaatctatactgacgggcaagcaaagtttgacgccctctttgccgacatcaaacaagctcaaaaaagtattcatatcgaatattatacgatctataatgaccgattgggcaatgagttacaacaactattgattcaaaaagccaaagaaggcgtttcagtcaacgttgtctacgatgcttggggctcccaaggcgcaacgcaaaaatggtggcgcgcacttgaagatgtcggtggccacgcgcgaacgttcttcagttcaaaacacacgattaccgattttcgcttgaacttccgtgatcaccgtaagattgtggtaattgacggtaagattggttatattggtggctttaacgttggtgatcaatatctaggccggagtaagaaattcggacattggcgtgatacccatatgcggattaccggcaatgccgtgttagccttacaagtacgctttatgatggactggaacgcgagtgttgagtctgcgattaagttaacttactcggaagaactcttcccagtggaccaatcccaaaatcgtggatcagcagccatgcaaattgtctcaagtggtcccgataaattagatgaacaaatcaaactcggttatctgaagatgattagtaccgctaagaagcgtttatggattcaaacgccctatctagttccggatgatagtattattgatgcgttgacgactgcggcaatgtccggggtggatgttcgtatcatgacgcctaacatgccggatcaccccttcatctaccgtgcaacagaatactacagtcaactcttgcatgcagctggcgttaagatttaccggtatgaagatggattcttacatgctaagacggcggtcatggatgggcatatcagcactgtaggttctgccaatatggatatccgtagtttcaagctgaactttgaagccaatacgtttatttacgatccgaaagttgcagcgcaacttgaagcgatctatcaggctgatatggaaaaagcatccctactaacagacgaaataatcgcccaacagtcaacttggttgaaatttaaacaaaaattttcacggttactttcaccaattttataaaatgttcgttaactcatttttatgatggtgcaatattaaattaatcccaatctaaaaaattttttaaaatctgttaagctttgtccggcgtgcttttgaaaaattttgcgcattagcagggattgactttacccataaatatgtttaacttaagtacaggacgttgcccaagacaatcaaatgaacattcgtaaacgaccactataattagtggtcgttttttgttttatctacaatatgtggtgtttattgattgcatcttccatttcaaaacggtatactatttttatcgataagagaaatacaagggagttaacgattatggcaaatatcacattatatactaagaacggctgcccacaatgccggatgacgaaacactttttagaaacgcacaacgttccttttgttgaacataacatcaatgacgaaccacaatatattgattacttgaaggaacaaggtttccaagccgttcccgttttagaagcggatggcctagaaagcttctcaggttttagaccagcggaattgcaaaaattggcgatttaagcaccatgcattcccagttttaacgggtgaggccgactcttgattactaaagagttggtcttcactttttttaaaccctaaaacagctaatatgactagaaagtggtggcaaggatgtctttaaaagagattaaaaccgaagatgtaacatactatgaattgaataaccaaattaatattccagtgaatggtcaaattccattacaaaaggatcaagaagcactcgatgcctttttggaacaaaacgtacaacccaatatggtgacgtttaaatcacttcaagatcgtctagattatttagtcgcggaaaattattatgaagcagattttttgaaggcttattctctttcattcatggaagaattgaatcaatatttaaaggaccaagacttccacttcaagtcatttatggctgcttataagttctatgcgcaatacgcattaaaaacaaacgacaatggcttttatcttgaagattttaaagatcgcgtttttgtgaatgctctctacttcgcagatggtgatcaaacccttgcgctgcaactagcggatgaaatgatccaccaacgctatcaaccggcaacaccatcgtttttgaatgctgggcgttcacggcgtggtgaattagtttcatgtttcttactccaaacaaccgatgatatgaattcaattggtcggacgattaactcggcacttgaattatcacggattggtggcggggttgggattagcttgtcgaacctccgtggagctggcgatccaatcaaaggcatcgacggtgcagcaagtggtgtcctccctgtcatgaagttattggaggattctttctcatactcaaaccaattaggtcaacggcaaggcgccggcgtggtttatttaaacgccttccatccagatgtgattgctttcttaggtgctaaaaaagaaaatgcagacgaaaaatatcgtttaaagaccctctcattaggcttagtcgtccccgacaagttctatgaattggtgaaagctgatgctgatatgtatttattcagcccttacggtgttgaaaaagaatacggcgtacctttctcatatgttgacatcaccaaagaatatgacaacttaatcgccaacgataacatcaagaaaaccaaaattaaagcccgtgatttagaaaatgaaattagtaaattgcaacaagaatcaggttatccttacatcgtcaatgtggacacagccaatgctgcgaacccaattgatgggaagatcatcatgagtaacctctgttctgaagtcctccaagtgcaaaccccgtcacaaattaataaccgccaagaatatgacgtgttagggacggatatcagttgtaacctgggttcaacgaatattccgaacatgatgacgtcacctgactttggtggttctatcgaagccatggtgcgtgctttaacctacgtcacagatcattctgatattgatgtggtcccttctgtggctcatgggaacgaattggcccacaccattggtttaggtggcatgggtctgcataccttctttgccaagaaccacatgatgtatgggtcagaagaatcaatcgactttaccagtaattatttcatgcttttaaactactggacacttgttgcttcaaataagattgctaaggaacgtcagatgacctttgccaactttgaaaagagtaagtatgctgatggtagttacttcgatcaatacctcactgaagactgggcccctaagacggacaaagtcaaagcgattttcaaggacattatgattcccacaaaagccgattgggaagctttaaaactagccatcatgcaagacggtttataccatcaaaaccgcttagccgttgcaccaaacggttcaatttcatacatcaatgatacttctgctagcttacaaccgattgttaaccggattgaagatcggcaagaaaagaaaattgggacaatctactaccctgccccaggtctttcaaacgataccatgccatattatgaatcagcttatgacattgacatgcgtaaagtcatcgacatctacgcagcagcacaaaaacatgtcgaccaagggatgagtatgacactcttcatgcgttcaacgattccagcaggcctttacgaatggaaaaacggccggactgacaaaatgaccacccgggacttaaacatcttaagaaactacgcccaccacaaagggattaaatcaatctactacatccggacttacacagacgacgaaagtgaagtcggcgcaaacgcatgcgaaagttgtgtaatctagagtgcgtttgaaacggtttgactttgagcattagtctaactcggcgaataactgctataagcagttgtttgacgagtgtaactaagcgcagaagtcagtttcaaaaagcacgtttcaaaacagagtgcgacggcaggcgtttatattttgagcattagcatagggaagcgaattagcgaagtagtcgatgatttgattcactgggctaagcgcagaaagttagcttgaaaagcacgtttcaaagcaagcaccaaatctccactccagctgctcgtcagctggcctacatacctaaaaaagaagcacgttaaaaggagttcatgaacatggcagaaaattatattgcaattaactggaaccaagttgaagatcaaattgataaagcaacctgggaaaaattaaccgaacaattttggttagatacgcggattcccctttccaatgacttagatgactggcgcagtttaccagacaatgaaaaatggatcgtcgggcatgtctttggcggtttaaccctacttgatacgctacaatcacaagatgggatggccagcttaaaagccaatatccgcactcaacatgaagaagccgttttaaacaacattcaattcatggaatccgtgcatgcgaagagttattcatccattttttcaacgttaaacacaccaactgaaattgatgaaatcttcgactggaccaacacgaatgaattcttgcaatacaaagccaacaagattaacgatatctatcaaaacggcacaccattgcaacaaaaaattgccagcgtctttttagaaaccttcctcttctattctggtttctataccccactctattacttagggaacaataagttggccaacgttgctgaaatcattaaattgattatccgtgatgagtcagtccatgggacttacatcggctataagttccaattagccttcaatgaattggataagtcagaacaagaagaattgcaaaactggatgtatgatttactgtacgacttatatgccaacgaagaaaaatacacccacgaagtttatgatggcactggttggacagaagaagtattaacttacctccgttataacgccaacaaagccttaatgaacctcggccaaggcgccctcttcccagatagcgctgaagatgtgaaccccgtgatcttgaatgggatgtcgacttcaactgctaaccacgatttcttctcccaagttgggaatggttatcgcttagggaatgtggaagcgatggaagatagtgattacgactttgattaattaaatgcaatagcgcgccccactaatttaagtgagacgcgctatttttttggttattttttaaattgtttcagatatcgtccggccaataatttatgaaacttaacgcccaacgtcggatttgaggcatcaatatcggcatacatcgccgttgtaatcttgttgagtagtggcactaactggtcgagttctgcctcggtcaaggcgttcacaaacggtggcacctcttgattggcagtttcaatttcttgacgaccggcatccgttaagttaactaaattaacccggcgatcacttgggagcttacttaacgtcaccagctcgcgtttagcgagtttagcgacaaattcactggttgattgaggtgacattcccaaacgcgttgctagttcacgttgcgataagtgatcttcatcagcaagtgccaatagaatcttcccctggccttcgacgattaaatgcgggcgtgcttgtttaacgatatcatcgtagatcttactgagttgttcatattcagctaattttccggcgaccaattcggccttgacactctttgccatacgtcatcttcccttcgctgttttaattagtatacaccattccaaaatctaagagtagcaatccttgacattttaatcaggtgaccttactatataaattaatcaggtgacctgattattaaatgaggaggcaatattatgtgcagtgagcatgtcattgaagtaaacaatattcaaaaagcatttgggaccaaaaaagtggtgcgttccgtttcgctagccgtttctaaaggtgagattttcgcattattagggcccaatggtgccgggaaaacaacgctcttaaaaataatgaccaccctcctacgaccagatagtggcacaatcacattaaatggctttgatacgataacacaaagccgccaagtgcgccaacagtttagtgtcaccaatcaaacagcggcaatcgatcaagacttaagtgcgcgcgagaatctccgcttatttgggcggttaaatgggctcagtgccaaagcgagtcgaacccgagctaacgagttactgacggactttgatttggaccaatcagcggatcaaacattggcgactttttcaggtgggatgcggcgacggttggacttagcggtcagcttagttggcaagccaaggatcctctttctcgatgaacccaccactggactggatccaagaacccggacgcaaatgtggcatgcgattcaaaaattagtcgcggatggctcgacaatctttttgacaacccaatacttagaggaagcggatcaatatgcggatcggattgcgttgattgatcatggccaattgattgccagtgggacacctagtgagctgaaagcgcaagtcggtggtcagcagttgcagctgacggttgccaatcaacaacaagttacccaggctcagacgatttgcgagaccgttttgcaacagcccgtgcgtgtgacagatcaaacaatcattgggccgttagtgcacgatgatatgggcgtcatcaccgcgattttaaatcaatgtcagctggcaggcatcaccatcagcgatttacaattgacagccccatcgttagatgacgtctttttgaaaatgaccgttggtaaaaactaaggagataataacatgctacaaatgaaaacaaatacgcaagtgttgcgcaatagcttaacgttaacccatcggaatttactgaagaccttgcataatcctgataatgtcagtgatgtgctggcgccctaccgctaattttggcgcactcatgatggcgttattcctagctgtctttattggctggtcaacgtcgtggattttcgccttagtcggttttctggttaaaaatgccgaactgattagtagtttatcgatgatcatcattctggtattgaccttcttatcgaacgcctttattccagttaaaaccttaccgcattttctacaaaccattgtccgcattaatcctgtcaccacaaccattacggcaatcagaggaattttgaacaccggtcattggagcggaaccgcaacaatggtcctcgtcagtggcgctgtgattattctggtgtttatgccactgacagtcatggcgtatcaacggcgtgactagaataaaatagcgcgccgcacttgtaagatagtgagacgcgctattttagtttaaattacttggtagtcgatttgatcaatcttgattttgggtaattcatcaatattcttgtctgtaatgatagcgaaagagacatacgcgcgatcattttcaggaagctcttcgtaagtgatcgtgccgtacgcaagtttaaacagcttagcatgcttacctacttgatctttagcgattgcaaacacatttggctggtcaaaatacgtatttgtagtttgttctttgccaccttcaagatagtgtttcatagcagtggcatccttgatgaacccttttacagagtttagcactaaataatcgttaccgacgcgataaatataaccagagactttcttttgattcgaatgagtcgtagttgttaatctgattgttccatgtttaggtaaactagtccctttttttagtctgtgttttggatggtgtatgtatttcaatggaacgattgcaactagtcataaaaaacattgtgatagatagtaataaaatgaagactggcattatttttttcatagtgattgttttctccccgatcattgaatttgataaattggatagcgattgtagagcgggtcgtttagattggctgtggcaacaatggcttgtagtgtgaagtcgcgtggaatgcccactgtgaccatcccatagccaaagtcttggtgtggtttaaactgattatcggcaataaaaatgaagccgtcttcgtccagtttttgataggaatcgtgcgctagtgtttgcgtagttgtttgactcaaaaacgttttgagcttatttttcgtattcagttgttcgttcggttgatgcgcaatgacgaaaaaggttttatgccggtaagacagccaataggcttggacatcttttttgtcgtaagtctgttggttttgtggacgcaccgtttttttctgcgaactatgctgaggcgtcgttgtttttgcaggatggttctgacaggctgttagtcccaataatgcaacggtcagcgtcaatgttagccagagatgcctgattttcataagatcagtccttcacagtttagtttaccccctataattataacagttacgcctactttgactagtcttaaatattaagttttatcgaaaaacgataaaaattaattgtttttcaataaaaaacgattataataaaactattcttaaaaacgaggtatcagatgaatgttaaaaaaatggctacttagaatggcattactcggaattgcggcggtatttggtctgttaagtttgttagtgacgatccaaattgtgaccacgaaacacttagaatacccagcgacaatctggatgttggcgattgctgcgtatggtgtgacggctagtatttggtttgcattaatcaagttggcgcagattctccgcttaattgagcaccatcaagtttttctccctcagacgctacgatatgtatcagcaattagaaaagcgattttggttgcgagtttgacggccctttttgccctaccctttttctaccggattacgcaactcgaagatgcaccaggcttgatgttgctggggttaggcctggtcttcattccgtttgcaatcctcattttgatgcagattgttgaagatctttttaaaagtgcaatcgcctttcaatctgaagtcgatttaacggtctaaggaggaattcaatggccattcgtgtgaatttagacgtaattctcgctcaacggaaaatgagtgtcacggcgcttgctgaacaggtcgatattacgattgcgaacctttcgaatttaaaaaccggtaaagccaaagcaattcgcttttcgacgctcgagaagttatgtcgcgtattagactgccaacctggtgatattttagaatatagcgatgattaatcctgcggccctcttttatcggggaccgcttttttaatgcttcagtacactggttgatgcgatatgtagtataataaatccgtagtgattatgaaaggggttttatgctgatgtattacgttgtgatgaagtcaaatgatattcgccgaaacttggcaaccgaacaatatttaatgaatcaaaaaaatttcgatgaaccactcttactattctacattgagaaaccatgcattatcgtgggccgcaaccaaaatacgtatgaagaaatcaatcaaaaatacgtggaagaccatgatattacggtcacacgccggttgtctggtggcggtgggatttatcaagatctcggtaacctttgtttcagtttcgtggtgaacgcagattctgaacaattcggtgatttcaaatccttcacgcaaccaatcgtcgatgcactccatcaaatgggcgccacaacggctgaagtttctggtcgcaatgatatgttagtggacggtaaaaaattctcagggaacgcgatgtacaccaagaatggtaaaaccttctcccacggtaccctttcatgggatgttgatttagatgttttgacccaagccttgaatgtccctgcagataagattgcgtcaaaaggcattaaatcgattcgacaacgcgtcacaaacctaaaagggcacgttgatcctgaataccaaaacatgtcgacagaagagttcagagacgtcttattactgaacttgatgcacgccgatcaactagctgatattgccgaccgcgaatatcaattaacggccgcagacgaacaagccatcgataagatttttaacgatctctatagcaattgggactgggtctatggcaaatcacctaaatcaacgattcaaaaacgcaaacacttcgatttcgggacgattgatgcgcgcttgttaatcgaaaatgggaatattgccaacgtcaagttctacggcgacttcttcggttccggcgatgccaacgaattggctgaaaagttagtcggcacggtttatgaccgtgaacatttagcaagcactctcgaaccaatcgacaccacgtcctacttcacagggattccaaaaacagaattagttgaattattagcacaatagtaactagctaaaaagagctactaccaaaataatcttggtagtagctcttttaggttaacgtgcaaatcgtttaaaacgaatcgtcatgcgtctggtttgcatgaagtgttgacaaataccagcaataactaatgggatgaggatgcctattaccccactaatccagaaaatcggttggtggaatagatttgcgagttggttcattggttgatcaccaggaatgttcaggacaaaagtatccacccagcttggtaacatgcgttcaatcgctggttcaatgtagtgttgatagagtgtcgacagaattagccatgcagcaaataagaaaagccaagctttacgttcaaataacgtaatgaaactgctaatggcaatcccttctgccatgatggtccagatgagtacaatggccagcaggacgaaacggctatcaagaaagaagcgattaatcccactttggtgggcagcaatgaagtatgtgccgccgtagagtgttaggaaactaatcaattgactgctgaagaggctaatcacttgggtggtataactaatactgcgcggaatgccatttagaatcccaaaattaaacggcttgcgggttgtcgcaaacgaaaggaaaatcagaacgagttggctgacgactaaggaaccgctcaagagcgtgaaccaaaaggccttccaggtcatttgattggagaagattaaaatggaaccgcctgtgatgatgacgaagacggcaattgccattaataagccgcgccaaatcgctgctaggcggtaccgcatcattgcattaaacatgtgcttcacttcctttgttcgttaatttaatgaaagtttcttgtagatcgatatggtcaatcgttagacgatctggaataacccgttcttctggtaagacgtcataaagataaaccgtgtataaggtccccatttgctgggaatctaagacgtttaagtcggtacagtactcgcgaacaagttcttccgggccactgacacggtaactcttggcgaggacggtttccaaatcatcatcgacaattaattgagcatcgttcaagaccaagacgtgttcgactaaggtcgcgatttcttcgatgatatgggtcgcaacgacaaatgtccgtggccgactttcataggcctgtaaaatgtagcggtataagaggctgcggtagttagcatctaagcctaagactggttcatcgaggaaaacatattccgccggcacacaaagcgcaacaattgttttaaaaatcgtgcggtacccagttgaaagctgattgagtttcttttttggattcaaatcaaatgcagtcagcatttctttggcgagtgcatgatcaaatgaaccttgcagtaaggcggtatttttaataatggtccgcaatttgtcatctttattaaagagattgatttccgacatcaagtaaatcgtttgtaacggatgatcgcgaccggttaagaccgtatcgccccatttaatctcacctagggatgcagtttgatgattggctagaatacttaataaggtactcttacccaccccattgcggccgagtaagccgtaaattgtattgggtttaagtgttaagttgatgtcgtcgaggacgacctgtttcccaaattgtttaatcagttgtgtggtttgtaaattaggcatggtcataacccctttcaatcagtgcaattaggtcgtctttggttaggtttaattgttgtgcttcagtgataaattgggcaacatagtgttcaaaaaattcagattgccgtttttcagtgatctgtgcgggtgcgcttgatgtgacgaacatgccgagtccccttttcttttcgattaagccgctggtaacgagttgattcatccctttgagtacagtggctggattgatattgaattgtctggaaatttcagttgtcgatgggacttgactaccaggtggaaagaccccagtaaaaataccctcttcaatttgttcggcaatctgccggtagagtggtgcatcattattaaattcaaaaagcatccggaacacctccgtttcgttaattggttagttacttatgtagttaactataatacgtaggctgcgaaatgtaaaccgctcctcaaaaacatttgattattcgttcatattcacctattatgtacttataatcaaatgttttcagagaggatgagaacgatgcagacagcctattgtttcattgatttagcggatagccgcacccgttttacggaacaagcacagacactccagttattgcaacacttcgccgacacgttgaatcaccattttccagcgttattaacaccatttgcaattaaggatggtgatggtctattgggcggtttttcagcggatgaccaggcacagattgttgatgtctatcccttttgtaatgcctatttaaagagtgacgcttttcaaactttctggcagacacattttgcggggctggcggagcccactttttattttggggttggcttaggaacgatgactacgccgagtccaagtgactatcaggatatcaatcgggtcaacgggacagcaattgtgaacgccctcgccgcagcagatcaagccaaactgttgcgtcaaggtgctgaattagcacaaggttatccctttatgacgacggcctttcaatttcaattagtggcagatcaaccagccgcaaatgggattaatgccctcttttatttaatttatgagcaactcttgaatacgcagttgcgcaaggacgcttttgctgaaatcgtgcttcaaccaacattgaaacgctatgaattagcggaattgttgtggaccaaatacggcgttgcttcctatgaactagactacagtgatcaaaaagggcgtgcattagcctctagtaaagtcagtcgcttactgaatcagattcagtatcccttgattgaacagaccctggcaacgttgcgcgcgcaactgatgacctttaaggaggcagtcgaatgaacctctttgcgcttttcttgcttagtcatattggctgcgactttgtctttcaatctgatcagatggctcaatgcaaacgatcaacgaaactcggtgtgaaatggtggccattatgcaagcacgcactgacacaagtcccgttagtgcttattttatggggtggcggttggttaatggcaccacctacttggccacattggcaaccgttactaatcggcttagtcatcattgtgatgagtcattggctcattgatctatttaaacaaaatagccagcgacttttaaaagcacagctacatttaaccagcaatcgcgtaccagtgatgagttataccatcgatcaagcactccatttaatagtgatcggtcttgtgagcatgttcctcggccagcaatgggcgtttaaccatgtgaaccgattgttattggctgccagtattgttttgagcacgttattatttgccgattatttcattagcttctatttaaaaggactggatttaaacatggatcgcctgccagatggtgcaaaactgggtcggcatattggtcatttagaacggtttgccatcttaatcttgttttacacgcacaatgttgcgagtattgctgtgattgtggcgattaaggcgctgacccgctttaaagccattgaatccaacgaacaccacttcgccgaatattacctcattgggagtttgctcagtctgatcttcggctgtcttggcggttatctattaagtcttattgcgcattaaaaaagtgccacagaatcaggatttttcctgttctgcggcactttttatattattcagcgatgattaataatgatttaatcgctttgcgttgatccattgcttcataagcggcttgaatatcatctaaggtaaagcgttgtgtaaagactttaccaggattaatggcaccctttaaaacagcatccaataaacgagcgcgatcatgagtcgttacggcagcaattcccccacgcaaaccgatgttcttccggaataaggcattggtgttcatctctgctttttggggaatgccgacacgaccaatgacagcccctgcgccagcaacggcgacggcagtggcgacggattgttcggtcccgacacattctaagacggcgttggccccagcgttgtcggttaacgccatcacttttgcgaccccttcgtcaccgcgttcagcaacaatgtctgttgcgccgaattcaagggctaatttttgccggtccgcatgacgactcatcgcgataatccgtttcgcaccgagtaatttggcgccaatcacaccacataaaccaacggcgccatcacccatgacaacgactgtgtcaccgggtttcacttcagcggacacggcagcgtgatagccggttgccatgacgtctgaaagcgtcaatagattattcagcattttatcagagtaatcgcttggttggccaggaactttaacgaggccccagtttgcattgtgataacggagatattcggcttggtagccaccaggattattctcgcggttggtacaatcgccatcaaaaccgtttaaacaagcggcacagtggccacaaccatgggtaaatggcacgatcacaaaatcaccgacactaacattttgtacgtcagtcccaacagcatcaacgatgccaattgcttcgtgaccggtgaaaccgcctacttctcgttttgaaatcccacgataccaccataaatcagaaccacagacgcacgcgcggataatgcgcacgaccgcatcggttggtttttcaatcgttggttttggtgcttcggtaatggtcatttgaccaggacccataaaagtagctgttttcataactataatctcctatctcttcctattatattgtctttactatacaccttagacctcactttaatgcaagctttttttaaagtccaatcgccagttgttgtttcttgcttaacacttcgtcttgggtaatcccaatataatggagcgtcgtttcttgcgttgaatgaccaaaatcaatcatcaatgaccgcacgtccccgaattgtttgtagaaccagtagccgtaagttttgcgcatcgtatgggtgccaatatcattacgcccaagtttcttacctgcttcagtcaacatgcggtaaacaccgttgacggtgatgtggttatcgccgacgcggctaggaaacaaccaatcattgcctagcaattcattattttgaatatagggactgatgtatgggcgtaaactcgccaaactaatttggcgccacttacccgttttttgttcaacaatcacgggattgtcttcgatcacatctttgacttttaactgcacaatatcagaacagcgcaagccagtattaatgccgagtaaaaataataaataattgcgactacccatttgtgaatggcgcaagatgactttcatgtcttcaatctcatcttttgttcgtaaaggttgaacatttaattttttgccttttttagtgcgcgatttccgcatgttttttccgcctttttgaccgcattctttttctctatatcattataaaccatgcggtggtattttgcacctttgattatcgttgatttaaagggattccgagcgcattctttctaccaaaagaatgcgctcaaacacattaaaggctattgatggctaaatcgcggtctaatcacgtttataaacggttaatcaccagaggcgcattttaagggcgtttcagattagtaagtggacaagtggccatgaaacttgcttaaaatgcgaattcaaaaaggtcccttaaaggcacaaaaaaacagcgttaagacaaaaagtcctaacgcttttttttaatagccggctgacaagtctaccggattgacgggtaattcacctttgtctaaataactgggtaaattttgatcgaaaattttgaagagccgttcatggatatcagcgatgtaacctgaaatatgtggcgtgataatcaggtttggtgtggcccataatggtgaatcacttggtaatggttcgttttgggcaacatcgattgctgctcctgccaaatgaccggattgtagatagtgcatcaaagctgcttcgtcgactgaagcgccgcgccctaaattgaagaagtaagcccctcgatggagttgcgtaaaaaaggtggtgtcgaagaaccgattggtgaccggtgttaatggcatcacattaatcacgaagtctgcttgtggcaatgcttgttcgtaatccgtgtcggttagaatctgatcaaaattggcaacgggtttctcgtgccgattaacgccgattgtgtgcatacccatgacgtgggcatactttgcaatttcctcaccaatttgacctgttccaaaaatgaggagtgtgcggtgttccaaatttgtcatttgttcaccaatagcatgatgctcccattgatgcgctgcttgtgcgggtaagctctgataaatcccacgggtaaagtgtaatatgtaacttaatgccgtctgtgcgattggttttgcgtgcatcccgcgtgcgtttgataccagtaccccttgcttagctaacgtggctagtggtaaataatcaacccctgagcttgcggtctgaatccattttaattgattaccgggctctgctaaaattttcgggcctacatctttattccaaccaaacataatctcaatactacccagttgacttggttttaaatcagctaaagcgatgattgttaaaccttttgcagttagtgctttgacgtgttgttcaggaattgtttctgctgctaaaatgactgtcaagttgatccctcaccttattattgaagtaatctttattataagggattttcagcaaataaaaaagcattaccgactgaaaacggcaatgctttataaaaaattctattctttttctgcacgtggccatactggacgaccccagtattggaataaatcagtttgaatccgaccattatacaatttccggcgtttagttgcgcgttgcccgaatgattcttggaattgtaagtcacttgttaaaatatacttactccaagtcttcaatgaccgataggtatcacccatttctttatacaaagcacgggcttgtgtttggtcgcttaatcgtttcccgtaaggagggttggcgatgatgaccccgttggttaaatctgtcttgaaatctttaacagcgagttgtttgaactggatatcatgtaaaacaccagcttcgttcgcattcaacttagcgatatcaatcatgttttgatcgatatcataaccaaaaatttcaagtggttggtctttttcggctgctttcgcttcggctttggcattttctaaaacagaagcatcgatccaatcgaagtcttcaaaggcaaacttacgatgcataccaggtgcaatgttgtgaccaattaaagctgcttcgatcgcaatggtcccagaaccagtcgttggatcaacaaatggcatatcaggttgccaacggcttaaaagaattaaggatgccgcgaagttttccttcaatggggcttcccctttttcaaggcggtagccccgcttgaataaactaggaccagttgtatctaagctgatcgtcacgacatcttttaggatgctgacttcaagcggatacgttgcgcctgtttcagctaaacgtgttcggcggtgatagacagtacttaacttatcaacaatcgcttttttagtgatggcttgcacgtctggttcgctatggagcgttgaacggactgagcgaccagcaactggaaaagcggcgtctaatggcaggaacttgtcccatggcaaagctttcacttgttcaaaaaggtcatcgaaggttttggcctcaaattgaccaatcgcgattttcacccgatcagcactgcgtaaccagagattggtttttgcaatatctgccacatcgccttcgaaatacacccggccattatctgaacgtgtttcataaccgagattttgtaattctttggccgtaatggattcaatcccactcgccattgttgcgtatagttggtaagtcatgtttttaaagatccccttaggaaattattttttaaataaaaagagcttgggcaaaagcccaagccacctgattgtaaacctttataggccatgttttgttccagaacttccccaggaagaaagttccttcagtaatcatctatctgttcttacgaactctcatttttagttcatttccataaatgagacgcccctaccaaagtttgggttactcgctcgcggggtttacctcgttccaccgtccaagtttccaaggacgctccgtcactgtggcactatttaaggatattcacgcatgaccgaagttttagcgctttttccgccgttaccgttaaggtaccctggcttattgggccaggcacgaacactacaagcatctcagcctgtgcgggcatggaccttcctcagcctaccgatgtagaccgcgattactcaagatttacaaatattgaatcaatgtttataagtatagcacaagattaaagatttgtctcgtcaaattgtgaatgattttgaactcttgtctgtggagcttgattttgttcacttaacttagcaccgaacacgtggcgttcaaggtttgataagcgtttcaaaatatcatagttggttgctgctgaagcttgttgtggtgcactttccttcacgttatcagaagcgctgagttggcggtttaattcgtcaaccttcttgaataagcgggcattttccgccgttagccgatcgattgcttcttgataagtttgatagtctttaataactaaatcaaggtaaccatcgacttcttcaggttcatagccccgcatttttgttttaaattcttttttcaatatatcagttgggttcaattcgatttcaatttgattgtccattttgacacctcatttagaataaatgtactatgattcccattatagcaaagttatcggataattaaaactcttgctgatctaattccgctaactcagtcgcgatatcttgtagttcgaaaaaatcgaccaagttaatcggataatcttgttggtcttgatattggcgggctgcatgataatcatattctggtttgcccggtgattcacgatcatagtataatagttgaccatccgtatgggtcagcatgaattgttgatactggcgcaattgttgcggtccagaatacggtgcgttaatcactggttcgcaaaaatcgactcgcgctttgagctgactcaattgagcttggttattttcgttccattgttgaccaaaatcattaaacggcaacatcatcgccaattttaaatccggatagtccgtttttagttcaatagcaacttgcagactccactgttcaatccccatttggccaccagtgatcacccactcgagcccatcatctaaatattgtgttaactgcttttttaatgaatatttaattactttaagtttctcgtcagtttcgccaaaaacaccgagttcatagcttcgatagccgctcacccatagtcgtttcaagtcaggtccctcccaaatgattttcaattaatctaaacattgctataatagtgaaacaggagtgtgattttcaatggcctttcattatcctaacggacagccttatacaaataatgagacaaaaccaactaaaaagcaagcccggcaaccagaagcaacaacgttatttggtaaacgcggcatgacgttggaagaagaactcaatgatagtaatcagtattatcgattacatgcaacggctgtcgtgtataagaaaccaacgccaattcagattgtgaaggtcgactaccctgcccgcagccaagcggttattaaagaagcttattttaaacaagcctcaacaactgactataatgggatttatcagggccgttacgtcgattttgaagcgaaggaaacgaagaataaaaccgcgtttccgtttcggaacttccatcaacatcagattgaacatttcagagcctgcttgaatcaaggtggcatctgctttgtcattatgaaatttgtcccgctacaacggctattcttgtatcccgcaacagaactgattagccgctgggacgcgcaagttgatggtgcacgaaaatcgatttcactcagtgatgtgattgacaatgggattgagattaagtaccaacttaatccaattattccctacttagatgccgtagatcagttattaaagcggtcaaataaaggagtttaaagaacaatgtccgataatcgaaacaataataattcgcgagttgcaaggcacaaagctgaagcaaaacccgctaataagaaacgccggcccctctttttaagaattctaaaatggctgttactactgattgtagtggctttcgtggctgggattggtttgtttgcctactatgttaaagatacaccaaacctaacgcaagcggacctgcaaagtccgaatgcgacaattctatacgatgatcaagggaaacctttcaaaacaattggtggcgaaaatcggagttatgtcaagagtgatcaaatcccgcaaacattaaaagatgcagtagtctctattgaagatcgtcgtttctataaagaaaaattcgggattgatccaatccgaattgcgtctgctgcagtcgccaatattactggtaaatcaccgctgggcttacaaggtgggagtactttaacccaacaattgattaaactgtctaaattctcaacgaaaaacagcgatcagactttcagacgaaaagcacaagaagcgtggcttgccgttcaagtcgaacgtcaatattcaaaagaccaaatcttagagtattatatgaacaaagtgtacctgaataacggggtcaatggtatggggacggctgctaagtattattatggcaagtcgttgaaggaattaagtttgccacaactggcattgattgcgggtatgccgcaatcgccaagtaattacgatccgtacctccaccctgatttagcgaagaagcgccgtgatttagttcttgatgcgcttttgcggaacaataagattacagcaactgaagctgccgaagctaaacaagtcccaattaataccggcttagtggatcaacaaacagtagcgaatagttcaacggattctaaagcaaccgacgcttacgtcaaggaagtcctcgccgacttgaagaaaaaaggctatgatccgtacacggctggtttgaaagtctacaccaatatcaatatggacgcgcaacgtaagttatacgatatcgtcaataatgatagcagtattccattcccagatgatcaactacaaacagcagtttcaattacagatcctaataacggtcgaattgttgcgatgattggtggtcgtaaaactggtgatgtgcagctcggttataaccgggccgtgcaatctggccgaagtaatgggtcatcaatgaaaccattaatggattacggtccagctatcgaatatcttgactactcaaccgcacagaaactacaagatgtcccttacacttatcctggaaccaatattcaattgcataactttgatggccgttatctcggtacaattaccgcgcgtaatgcgcttgccaactcacgaaacgtcccagccatcgaactgttagaagctgttggcatgactaaagcccgtgaattcgtgaaaggcttaggcattaacgtgccagctgatactggtctttcttatgggattggtgggaatgtttcaactgttgatgaagctgccgcatatggcgccttcgcaaacggtggaacttactatgcaccaacttatatccataaagtcgaaacagccgatgggattacgcataattatgattctgatggcacacaggctatgaagagttcaacggcctacatgattactgatatgttaaaagatgttattaaaaatggttctgggacgttagcccaaattccagggcttcatcaagctggtaagactgggacaaccgattattctagcgaagaaattgccaaatctgggttaaacccaactttagcgaaggatagctggtttgccggttataccaagaactattcagtgacggtttggactggatacgatgaaccacttaaaaatggattaacaatgagtgagcggaacgtcgccgcttatatctataaagcaatgatggcctacctcgctcaaaacgcaaccaactcagattggtcaatgccaagtaacgtggttgctaaaaacgtggctggcgtacgagaactctatattaaagggacgacgaccattccaagttcttcaagcagtcgatcttcttcaagtagtgtactctactctagctcagaagcaccggtcagctcaagcagtgaaatttctagctcaagtagcgtggttgaaacaccaagtgaatcttccagtgtgccggagacctcatcttcaagcaccccaactgaaagttcacaatcgcaaccttcgacctcaacccctccggcaacaattaatccaggaacggggtcgacgacacaaacaccagcagcgccaactaactaaaagaagcaccgttcagttcaacgataaacgttggctgaacggtgctttttttgcgttttttaaccacgatcttcaagaaattgttggcctgcttggcaaatccttaataagggacactcatcgcaatgcggcttacgtgccgtacagacttgccgcccaaaaagaatgagtgtgtggtgcgcttgaacccatgttttcttaggaagcttcgcttgaaagtccttttcaatctggatcaccgaggcatcctgtgcactgattttgagccgtttggcaatccgagtgacatgcgtatcgacggcaaatgatgggacgttaaaggcgtcacctaaaacgacattcgcggtcttacggccaacaccagcaagttgttccaattcggcatgtgtgcgcggcacttccccaccaaaatctgccattagttgctggcagcatgttttaatgtgtttagctttattatgatataacccgattgaatgaatatcagcttcaatatcggcaatctctgcattcgcgaaactagctggtgtcgggaaatcagcaaatagttgtggggtgaccttattgacggaaacgtcggtggcttgtgcgctaagcatcaccgcaatcaacaattgaaacggtgaatcagcaactaatgcgccctgcgcatctggaattaaattgtatagttggtgcatggcccactgtgttttggcttttgataacatccgcttcatctcctattcgattaacgtcttggatgggccttttggtaagcttgtagggattctttatcagtaatattttgtttctgccagttgagcaaaatcttatcaacgtacttcaaggaatagacttgatttaaaacggattctcgtacggctaattgaatcaattctggttgataatgatctaaatctaaccagttggcaacaatctcagattccaatggcgataatgggcggccaagagcttgttcaacttggttaaagaccgcactccgttggttaccgtctagtgcttgttgagtgacttgtgcgtcttgaacggctagcacgctcaatttagttaaggctggtgtgagatcgtaatggtcttcagccttaccttgttcattgacagatgatttaagggtaattagttttttctgtaaaagttgatgaatcaatgcgtaaatttggctggattcaattcccatgcgttcaccaatcacagctaaatcgggaaagtcattgttttgactggcaaaatcactgagctgtaagtaaaccactaattcttcagaagacatcttgagcgtttgatagtgatgcagtaacagtcgagagacactcaattggccgccttgtaaaaacgcggtaagttcgttcatattctagccttcttttctaaaagtttcattagttctattgtaaccaattttagacaaataaaaaagcgccgagaacctgatttcggttcacggcgctttagttaatcctcaaagccaactcgtttgagtcagcactctgatttgaaacatgcttttgaaagtagtcctcggtgctttgctacgtccagcaaacgatcgacttgcatcgctcattcactagactagacaaatgctcgagaactaaccactttcaacgcactctaattcaaacgtgcttttgtagctaggttcctgcgcttaacaatgattgtcaaataatcgattgcatcgattattcgccaaccaacgttaatgctcagaacctaaccagctacaacgcactctatttgaaacgtgcttcttcgaactgccttttccggttaactgtaaaacgggcaccatggctgtgaagcgccataatgcccgttttgctgttaatcctcaaagtcaactcgttcgagtcagcactctttatggtttgattctgttaatcattcttgggaatggaattgtttcacgtaaatgatcgataccacagatccatgtaatggcccgttctagacctaatccgaaaccagaatgtggcactgatccgtaacgacgtaagtctaagtaccattgatattcttcaaggtctaagcccattgctttaatttcagcttctaatttatcaaagtcagtttcacgttcactaccaccgataatttcaccataaccttctggtgccaataaatcagcacataagtaaacatcatcacgtgttggatgtggcttcatatagaaaggtttgatggcttttggataattcaaaatgaagactggttgttcaaattgatccgataaataagtttcatctggtgcgccaaaatcatcgccccatttaatatcgaagtcagctgcttgtaacatttcaacagccttatcgtatgaaatacgtggatacggtgttttagtatatttcttcaattggtcaacatcacggtccaataattttaattcataggcacagtgatcaatgacgttttgaacaaggtaagccacgtatttttcttggacttcaagactttcatcttgagttgtgaaggccatttctggttcaatcatccagaactcagtcaaatgacgacgagttttggatttttcagcacggaaaacagggccaaaagtgaagactttgccaaaggccattgcgccagcttcagcgtataactgaccactttgtgttaaataagcatcgttgtcgaaatattcgatgtggaataattcagttgtcccttcaggggcactacccgtcaagattggtggatccatcttgatgaagccttcttggttaaagaattcataagaagcgcggatgatttcatttctgattttcatgatcgcaaatgggcgttttgaacgtaaccataagtgacggtgatctaataagaattcaatcccatgttctttaggtgtaattgggtattcgctgctgtcaccaattaattcgatgtcagaaatttcaatttcataaccaaagtgtgaacgagtatcttcatgaatgacccctgtcacccacatacttgattcctgtttgacatcttttgccaattggaaaacggcttcgcttacttggcttttaacgacaaccccttggaaaaaggcagtgccatcacgtaattggaggaatgaaatcttcccacttgaacgtttgtcggttaaccaaacgccaattttaacttcttcatcgacatggttttttgcatcgataatactgatttttttaaccataaactctgtctccttatgtgcaacatttaatttacaacagttcaaaataactgatagttattattatataacaaaaccctgacaaccacagccccctaattgagaaccctagatattttcaatcaattgaatcgtcttcccggttttaaaatcgagggttaaataacaaagacggcctttgtcacttttatagacaacttcccaaacaggcttgttgcggtacataccgaagttaatgttcagtactttttgcggatttttagttgaccatgtcttttctaacgcatcgtttttagaaataccaccactttgacgatagacagtggcatgattgcctttttcgttgattaaaacgaagatgccgtgattatcacggtctttaccactaacggtataatatgttgcatttcgatgatacgtgtagaacccatcaggctcttttaatttcgcgtattttttagcaatgttaacggctttggtttcagccgttgcttcgggttttcgagcttgatgataaatcatcagcatgctgccaatgattaccaacaataagaatatccagagccatctcttatatttgcgcacgctgcattctctccttgttcgcttgaataagccttattatagcaaaaaataacggctatcggcgcttaaaaccgaatcttagtgggaatttaaccaaaacaagtcggttaattcccggattattttaaccgacgctgctttttggggcaaacttgtcggtaacgcgcggcgcatttgttgcccatattgggtcgataataaccggggatctaaacaaatgaagacgccgcgatcgttaggggttctgattaagcgcccaaatgcttggcgtagtttaatcgttgcttttggtaaagcctctgctttaaatggattaattccttgggcagaaagttgagcgtaacgaattcgtgtctgcagtgcattcggcgcatcaaatggtaattgaacaagcaccactaattccagtgctgattccggaaaatcaacaccagcaatgaaactgcttgtcgccaacaagattgaatcgtgccccagcataaagcgcttggtaattttctccgcactacccgtaatcccttgggcaagaatctcacgatcaagcgataaaccggcgcggccaagcgcataatacacttgttctaacgcctgattagaattaaagaggactaacgcctgatgcggattgccaactaataacgttaatagctgttcagcaactgcatgatggtactcattgggggctaaattcttttgactaggaccatcttcagcgataaaaaagcgcgcctgtttcttgaagcggaatggactgcgtaatttcttagtcgctagtggttgcgcttcggtaaaaccaagttcacgtttcaaataatcgaagtgcccattaaccgcaagggttgcgccagtcaaggtgactggttcaaagtgcgcgaggatctgttgcatttgcggaccagctgaaagcaattgccactggagcttaaactgtggtaactgactaggttgtttaggctgtgtcatctgaatcattaacgcgtgttgttcctgcggtttcgtcgcaatgaataattgctcaaaccgttgataggcttcaacatccgccaacaataggttgatttcgttttcaaatgactgccaaatccccaaatccccctctgtatattgttctaaccgctgttcaagccagtaacgcaacgcgagaaaatgatcttgaatggtcaacagttggcggttcagttggtcgaattgattatgacaagcggtgacaaattgaaccacttcatctggattcaaataacgttcactaaacgcttgatgcgcttctggttgcggtagttcaaacgctgtggttaggtatgtctctaagtcactgatggttcggcctaacttggttaagtttttatgcactaaccgtaacgagcgggcttgcggtgattttttcgggaaaagccgggctaaattattattggcctgttccggatccgtatattgcaaccctttttgagaccaaagttgccaacgtgaaagtgaccaatcttgttgcgcaattttttgaacattgaaaatcatattttgtgcttcatctaagaccaagtatggtcgcgcaccccaggtttggtgatcattcgcgtgctctgccaggtaggcgtggttggtgacgagtaattcggcttgttgctggcgcttatgcaggcgacgtaagaaatcatcttgataaaacggcgcttgtggttgcagacttgttaatccccggtgttgcacgttattgaaaaatggtgtttggtaactcgttaaattgagttcatccaaatcccccgttgttgtttgggttagccaaactaagattttcatctgaagcaaccgcaccatccgattcttatgtggtaaacggagcgataattcaaagcgatgcaaatccaaatagtgacgcggactcttaacgatttcggcattaatttggcgacctactaatttttcaagaagcggtctggcctgcgttaaaatctgatcctgtagcagcgttgtcgatgttgcaaccactaatttgtgttcaggcgtcatgcgataactataggggagtaaatacccgatggtcttccctaacccggtggctgcttcaattaatagtggttcaggtgcctcagattcgaaattatcgtgaatcatatccatcatggcagcttgcgctttacgccatttcaagtggggttttaataatcgttttttatcagcttcttccactggataatcagccgcaaaattagatcccggatagatttcaaatgattcctcggctggttttcgtagggcaatgttttcacgaattaagagatcgttcggcagcggtctcgattgcgcatgcatctgctcggcaatcgctgtgaagaaatcccctgtttgacgtaacaagcccgcgcctaacgcactaagacgttctagggtaactaatggcagggtcttcagccgtgccattaattttaagaataatttagccgttaccaaggcatcgctgtcagcttgatgaggattgtcatgttcgatggcgagtaactgtgtgaggtcttgtaatcgatagctcggtgcttccggcaatacgatctgagccagttcaacagtatcgatgcccggcaaatcaagtggcggttgccccacgcgttctaattcgccatttaaaaaaggtaagtcaaagttaatattatgggccacgaaaacagtaccggataagagttcaactaacgttggcgctaaatcttcgaaaatcggtgctaattcgagttgatcagcagtgatatgcgtcaaatgttgaattttagtcggtacgtcgcgaagcggattaacatcttgcgaaatcgtctgaatgattttgccgttttgaatgagggcgcatccgaattgaataatgcggtccccttctttaatgtttgtgccagtcgtttctaaatcaacgacggcataaattgtctcttggttcatgctgtcaccaatactttactcattattatatcaatcatactatgaatgacgcgtagaaaccagtctagttaatagcgactagttggccaatcgacaatagatagagatatttagcggttaccggccggttagcaatttgcgtcaacgcggcactgtataggttaatttggccggcataccgcgctttaatcgcctcaatggcagcttctggatcagctgggttcacaaaatcagtcttatagtcgaacaaaatacagtcggtatccgtggttacataaccatccataatcccatggattaagacattgtcttgatcttctgggcgtaaaccggcgaataaggatgcagccggtaacaatagtgaaaatgggacttcccgatgaacttgcgctggttcagctaacagttgctgacccaactcgctcttgaagaatgtcatgatagcagcaactttaatttgttgtgcaacattggcagtgaggcttttttgtaaaacaagtcggtcgatgacactttgcacccgatcgatcgttactggttgggttaaatcgatttcttgtaagaccagatgcgtcgccgttccaatttcagccggactcgcttttcgaacagtctgcatgaattgtggttgaggtaattcatcggtcacgtaacgatgggtttgttgcggtgtatcagcgtcaaagcgtaattgacccaactgatcattgtcgggatcttcaaagagccgtttcacttctgaaacagactggtaagctgtcgtttcggtggcgccttttgctggataactgaatgttagctggtcttgaatcccgttggctaaatcagttgttaaatcgaccgccttgagtgccacttgttgttgctggctccaatcttgatcatggtgtaaagcacctggtaattcgccaaggcgcgtttcacttgtaaacgttaaattaaattcagttgcgtcatcgctcagaggtaggaatggtgtcccctcttcggtccaatcacgggcttgcggatgacgaattaagctcaatccaatccaatctagtaagttcgtgctagcttgacgaacagaagcgtccaaccgcagatcaggattttgctgtcctttttgccaagttgcaaatagtttcgcttggttatcacaactgcccgcgataatcagccgttgctcggcacgcgttaaagcaacatagagttttcgcatttcttcagcgcgtaacttttgccgtttttgggtcgtgatggttaattctggtagtgttggaatctttaaccgttttttcgcgtctaagtaaacaattccgagtcccgattgatcatcgagcacgtaattttggcgcaagtcttgctcgttaaattgatgattggcatccattagaaagaccaccgggaattctaagcctttactcccatgaatcgtcatcacagagatggcatcttgattggcgagactggttggttgggctaaatccttatcttgtttttgcaaacgttcgataaattggatgaactggaagagccctttaaagccgtttgcttcgtaagtcgcagcgcgttcatagagtgcgtgcaagtttgcttggcgttggcgacctgctggcatcccaccggcgtaatctaaaaagccggtcttttggtaaattgtccagattaaatcaacgagtggccgttgacgtacaatggctcgtaactcatttaataaggtttggaaatgcgttaatttttcgaagacttgttggccgagttggccggatttttgtgcttcgaactgatcaagataattaaaaacggcttggtaatagtcatccgttttatcattaatccggattaatgcgagttcattttcgttcataccgacaattggtgaccgaagcacgctaaccagtggaatatcttgattgggattatcaataattttcaagaaagatagcatgatttgaatttccgttgtttggaaataattctgcgcatcactaatgacaatcggtaagccgaaccgttggaaataatcaagaatgattaggttgttgttgcgcgttggcgtcaataagacaatatcttgatagcgaattggccggatttcttgcgtatcccgatcccagatggtttcttgattatcaatcattcgtttaattcgctgtgcaactgatgcaatctgaccttcagctttatcaagcttgcccgttgattcttcatcagtcggttttgtttcgtataaaagtaattcagttggctgagttggttgatcgtcaggataataagtcgcaccatattgcaattcagcgttgtgatcgtaatctagctgccctaattggcggtccatgatttgtttaaagactaagttgacgaaatcatcgatattacgccgtgaacggaagttttctgcgagaataatgcgttcactatcgttatctggcttggcgaattcgtcgtacttaccgaggaacaaactcggatcagctaatcgaaaggcatagatggattgtttaacatcccccaccatgaagacgttgcggggtgcttgactagcgatagtttgaatgattgtttcttgtaactggtttgtatcttgatattcatcaaccaggatttcactgaatttattttgatagaacgttcgtgctgcctctgattccggagtgtcaccggccaaaatatccaaacagaaatgttctaaatcgccaaaatctagtaaatagcggcgtttcttctcagcttggaaggcttgcttaaaatcgcgggtaaccgtcactaacttaccgactaactcaccagcgcgccgttgaatctgactggtttgtgcttcgtcaaagacaaaataggttgttaaaagatcgtttagtgcccctttgacattatcgagggcgtttttgatccggtccttgtcatattgttcatcgggttctaatttcttagttcgtttggcgggtcccaattgggcgtcggtcaattgtgtgcgccactgcgcccaacttaaagtggccgcgttggcttgaatggcagttagtgctgcttgtgccgttgcgatagttggcaagtataccgcaaatttctcgtttgtttgacttagttcgttggcgagtgccaagtcttttaaacaggttgccaaggtcgcttctaactttggcagaatcgttgttttgaaataagcactggttgttaggccagtctctggtacctcgtaaggggcggttagagattgtaaccattcatcgggcgctggattggcaccagagaagttaaacagttcgaaaacaatgttggttagcccatcatcgttgcgatcgttcgaaaaattttgcgctaaatcataaaataaggcgtcgtttgactggtaatgttcttcgcgaacgcgttgccaaacttgatcctctaataagagacgttccgcagtatcacttaataaccgaaacgcgggatctaacttaatcacgtagtagaaatgtttaatgacttgtaagcaaaacgcatgcaacgtgctgatttgtgcggtcgggactaggctgagttgctgccgtaagcgttgttgcaccgctttgtcggttgcctcgcttgctttttttcgcagtgccgtttgaatccgttggcgcatttcagatgcggcggcttcggtaaacgtcaccaccaatagtgaatccacatcagtgccattcaagattttttgaatcacgcgttcaactaaaacggttgtcttcccggagcccgccgaggcagaaacgaggatatcatgccccgcgtgatcaacggctgcttgttgggttggtgtaaatcggcgatcactcatgtcgttcttcctccgagttcataattttggctaagacggcttgattatcaagcgcacttaattggcgataattattttctggtaacatcgcatcgaattggaaaatcgatttatatggcgacattgtgagtgcattcgtgcggtcgggccgcataatcggattcaaagcattttcgccagcaaaaatcgcttcccccgctgctttgattagttgatcgttatgggcaattaattgctgtaactcatcaagggtgaccagttgtttcgatttgaatgccccactctttggacgattgaagttaaacagtggtgaatagccactttctaaagctgtatccaagttttcgagtaaggtctcatcgtttaaaattaagccatcatacttaaattgatccagtaataattgatcgagttcgcctttttgtagttgagcgagtttttgtttgttcagttgcttcaatgacattgttgggttttgaaggtgcagataaaaggccccggctggttttaccttgctttgcgctggtaaaattgctgcttgatcttgcaagacagtttcaaggtatgtcaacatttgcaatgccaaaccatagtatgcatcgcggaagctaaagctgtgttgactggatttgtaatcaacaattcccaggtaggcttggtcgtttaatgtcagttgatcgatccggtcaattttcccccgcaccttaacccgacgttgattgggtaattcgaattctagaccagctaatccttgttgggcaccaacttggccgaataagacttcggttgccaacggttttaagttcgttcgttgactctgatcgcgcaatgtccggctgacgcgtttaattgtttgactcaattgttggcgaatgtagcccattcgcgctgatttattgaggatcttaaattctggttgttcatacgctttttgtaagatttcatccgtcaatgcatcgatttgttgattatcgagatcgggtaagactaagcgttgggcttgaatcatcttgataaattgatctaagacttggtggtagaaatcaccggtatttgcaggtgtcagttcaaaaattgggcgctcgttcagttttaagccgtattttaagaaataagcgtattgattttgatagaactcttctaatttcgagatcgacgtatggatttcattgccatataacccagtgacaatatcgcttgtcagtgcaacgggttggttatggtacgccagactttgaaggagttgattggttaagtagtgactaacaggaaattgttgtaataaacgataaacagtctgccattggtcaggaattagtgtttgcgtcgcttgtgcttgtcgcgcaacttgaatcaaatcgcttaacaaactacgccaagaacccgtaattggcgctgtacttgtcggaatgacttctgctagaacgcgttgctcggttaaatggaagtagtttttaatccggtcgacatagggggataccgtgtagttcgccccttccccattattcaatggataagtgaaatacaatccttcagtaccacttaaaaaggccaagtagttcagataaggttcaaagctcatctgactggcacttggatcagttaagaattgttctgaatttaaccgatcggttaatagttgccgatcatggtcggataataaggcgctggtttcaatctgatcaggcatcacttgatcggtcgcaccaatcataaaggtaattttgcggcgtttagtctgcaccatccctgattcagataaaacgacctggtcgagtgtcgatggaatttgcgcatattgcgccgtattaaacccggccgctagtaaatcccaaaagccctttagttcgaaaggttggtcgcctaataacgtcacatattcatccaacatcgtcataaatgtttgccatgtctgttccggttggccagctaaggcaatttgattggctgcgagtgcttggtcccgccaatttaacaattgtcgatcgacaccttgttcgattaagaattgatagagcactttagcggcatcgcgccctgttttggcactgtctaaccgtttataaaatggtggtaatacggattgaacataatgccgaatccgattgatccgttccgtgagcacttcatcttctgttgttcgaacaccatcttggaaggaaccgaaccgataatattgccaatcggctgcgcttaaccaatcatacccttcatacccactttttaaaatcagattttcacacaaatcaagatcagcccggaattcagcgactgattgatagtcatctggtattaaaagctccgtcttcaaaagcgccattacatcttcatagcggtagtaatgctctttcacatcaaacaacgctgccaacatcgcaacaagtggatgggccgccattgtttccggtaaatcgcagaagtacggcacttcgtattctgtaaaaatcggcgcaatcattgtttcataaggggctaaatgccgagtcataatcaagaagtctcggtagcgatagtggccggtttggactaaacgacgaatttcacgggcaacataccgtaattcggtataccgattttcggcaccgatcacttgaagttgcgtcgaatcgatttctggtgctgttgggatctgaccgtggttttcagaagcaacccagtaccgatcaagcgcgagtaacgttggtgaaacccgctggttagtggcaatctgatcagtcatgatgggaatgtgattttgcttggcctgttggtataattgataatacgtacgctcagcttgataaaagaagctgagtttttccggtggttgttggtaattaacatagtcggtaattaaggctacggttaagcttgcttgctgcattaagacggcgactagcgcttgttcttgagccgtgaattgtgcgaaaccttcgatatagaaatgacaatcgtgtaagtcttgtttttttaaataatcagttaaggcatcaattaacgtcgtattttcgatgaattgcttttgcatagcggcttcaaacgccgtggcaataatggttatttcccgcaatttagtagtcagttcgacttcttcgggcgctagctgggccgcaatctcagttagctcatcgggtgtaatacagcccactttaagttccaatagttggctcgttaattgagcaacaaagcctgtttgattgacttccccaccaaataagctgagttcttctgcatgttcttgcaagaggcggtagacaaggatgtttaacccggcggttgaaatccgcggaatctggtagtacggggtatttttcatgaaataccaagctaatcgacttaatgagaagacttggacgcgtgaggttgcgacatactcacttccaggggtttttaggtcatttaaaagtgcgacttcagattcaaatttgatatgattcgggaccaaataaaaaaagcggtccgtgttggtggccttaaggtctgtttgtagttgcttgactagtgtttgatggtggtcataactagctgtaccaataataaattttaagctcatggcgcccacactcctttggcgtcattttaccatagatagacaagtgattgggataaaatccggctagtccgttggtaaaaagcgggtataataggaaacccattaacctgtgcccaatttgatttatgtggcggtcatttttgttttgcagtatagtagtaagggtatcttcaagtcagaaaaagagattaagggtgattgtatgcagactggtgttggccaaagtcatgcgaaaattattttaattggggaacacgctgtcgtttatggacaacctgcgattgccctccccatctttgcggttcaagcgcgggtaacggtaactctcgagccggcactccagacaccgcaaattaagagtacttattacaatggtcctctagaacaggctgttggtcagatgcaaggcattcgccggttaattgaacaactgtggcatgcattagatccgaacttaaccccgtttgaattgacgattgaaagtgacttaccgcccgaacgcgggatgggttcttcagccgcaacggccgtcgccatcattcgagcgttatttgcgacttatcatcaagagctcagtcaacaacggctgctaaagctagccgcgctctccgaaaatttaatccacggtaatccaagcgggattgacgccgcgacaaccggcgcaactacaccattatggtttgtcaaagggcagccgcttcaacccctacccattaatttaaaagggtatctcgtaatcgccgacagcggtcaaaaggggcaaacaggtgccgccgtcaaaagcgttcagaatcaaatgatgtccaatccagaacaaacgcaacccttaattgaccatttgggttatctaacgcaacaagtcgcaagaaatattgcccaaaacgaattaacggtacttggcgcgaacctcaaccgtgctcaacttgatttgcgggcactcggtgtcagcaatgcccgtgttgatcatttgattgatgtggctaatcagaccggtagtttgggcactaagttaacgggtggtggccgtggtggctgcattatcgccctggccgctacgcaaagtgctgcggatgatttggcacaagccttatcagcagctggtgccatcaaaacttggattcaaccactacacgcactttaaaaaaaattaggagtattactatgggacaatcaattacagccagagcacatacgaatattgcgctcattaagtattggggaaaacaaaatccggaattgattattccgtataacagtagtctttcaatgacgctagatcatttttatacagatacaacggtccgcttttcaactgatttgactgctgaccaaattagctttaatggtgccattgcggataccaaaactagtacgcagatgagtcagtttctcgatttaattcgaaaacaggcgcatctgcctttatttgctgctgtggaaaccattaatcatgtccccaatgctgctgggttggcctcttctgcttccggttatgcggcattagctgctgcaggtagtcgtgcagctgggcttgaacttaacgatcgggatctttcgagattagcccgccgtggttctggctctgcaacccgctcgatttatggtggttttgtggaatggcaacgtgggaccaatgatttggattcatacgctgttcccgttcaagaaacagttgattgggacatccagatgattgcgattgtcttaaatgatcgtcaaaaagccatcgccagtcgtgctgggatggcgaatacggtggccacgtcgccctactacccagcatgggttgaaaccgctcaagccgcaattccggcaatgaaggccgcaatcgttaagaaagatataaatttggtggggcaattagcagaacaaagtgcgatgcagatgcatgcgacaacccttagtgccgtcccacctttcacctattttgaacctgaaaccctacaagcaattaaagtcgtgcagaccttgcgccaacagggtgtttcttgctattatactatggatgctggtccaaacgtgaaagtgatttgtaccagtcaggaaacacctcagattttagcggcgcttgcgccctattttagtcctgaacaactccttgttgctaaaccaggtcctggtgtgagctatcgataatgcaaatttaagttaaacgtgaaaggttctgatggtttgataacggctaaagcgcccggaaagctgtatattgctggcgaatacgcagtagtagaaacaggttttccggctattatcgtggctttaaatcaatttgtgacagtcacaattgaagagagtcatgaatatgggagtattgtgtctaaacaataccaagaaaattccctttattggcaacgacaaggtgatgaaatggtttttgataaccgcgataatcccttccattatattttgtccgcgattcgcttaacggaacaatacgcacgtcaagcgggtaagacattgcgcgtctaccacctacgggtaaatagtgatttagactctgctgatggtaaaaaatacggtttaggcagttcagccgccgtaaccgttgcaacggtaaaagctctctgcgccttttatgaattatcactatcaaacgaccaattgtataaacttgctgctattgcgcatttagatgtgcagggcaacggttctttaggcgacattgctgctagtgtttttggtggctgggtcgcttatcggtcatttgataaacaatggcttgctgacattcgaccaactgttagtctaacggagctgctcgaaatgccatggcctagtctttcaatcgaattattaacaccgccagcagagttgtcactcttgattggttggacggggtcgcccgcttcaacctcgcacttggtggataaaattgcccttgctaaaacagaacggcaagccgattatcaaaacttcctcgcagctagcaaagcttgcttagaagcgatggtcgaagggtttcgtcgtaatgatttagcccagatccaagctgaattacgccacaatcgtgccattttacaagatctcgctcacttcagtcacgtcgctattgaaacgccaatattacagaaaatgggcgcattagccgaggcaatcggcggtgctgccaaaacatctggtgctggcggtggtgattgtgggattgtcattattgatcgcgctatcgaaacagaggccctctttgaacaatggcgggccaatcaaattgaacgattgaaccttgcagttcacctcgtagattaggagcttacccatggtcagacccaaacaatccattcaatctcatcggaaagatgaacatgtctttttagcggaaaaattccgccatgatgatgccatcaatgactttgatggaattcggtttatccatcaaagcttacccgaaattgcggtatccgacgtggatatcagtaccgattttgccgggactaaccgggccagtcccttttatatcaacggcatgaccggtggtagtcagcagacaaagaaaattaacgcacaattagcgcaagtcgcccaaattaccaacctaccaatggcaactggctcccaatcggtagccattaaagatccgtcactagcggatacatttagcgtgattcgcgaattcaatccccacgggtttgtactcgctaatattggtgctggtaatgatttgaatgtggctaagcaagccgttgcaatgacccaagccaatgccctagaaattcacgtcaacacgccacaagaaattgtcatgcctgaaggtgatcaagatttctactggttagacgagattgctaacattgtcgccaatgttggtgtgcccgttatcgtgaaagaagttggttttgggatgagtgctgatacgattgcgcaactcaagcaaatcggtgtacaattcatcgatgtttctggccgtggcgggaccaactttgtcacgatcgaaaacgaacggcgtcatgataaagcctacgattacttagctgattggggccaatcaacggtcgaatcgctctttgaatcacgcgctttccaaaatgacgtcaatatcctcgcttcaggtgggattcggaatcccctagatatcattaaagcacttcggcttggtgccagtgctgttgggatttccggtcaattcttgcacatggttttaaaagaaggcccgacacaaatggcggaaaacttgctcacttggcaagcgcagattcaagagattatggcaatgcttggcgcacgcgatattcaagcgctccaaaaggcgccaattattctctcgcctgaattacggcattatttgaatgaacggcacataacattttaagcagcaaaagcccggtagaaggatttcttctaccgggctttatttgattgcttaattagcaactacgactttgccaatcatttggttcgtttcgaccagttgatgcgcttgccgtaagttggctgctgaaattgggcttaagcactttgtcagggttgattgcaatttgttttgttccaataaggttgcaatctgtcctaagataatgccttgactcgctaaatccgttgtttgatagtaggtctttgagaaaacccactcccaagcgaactcgacccgttttttagttaatttttgtaaatcgaccgggcgatgattttcagtgattgaagcgatgcggccattgggcttaatcaggcgcgccatactctcccagtgttgatcgatgttattcaactctaatatataatcgaccgtttgatagccgagtgcgtgcacctgttcaatgagtgattgatgatggttaacgacttgatccgcaccatgggccagcgcccacttttgcgtttccggacgggaggcagtcgcaatcacgtgcaatccggccaaatgtgccagttgggtggcgatcgaaccaaccccacctgccccattaatgattaggatggtttgatcatgattagtggttcgatcttcaaaatcaatgtgtaatttctcaaataaagcttcccaagccgtcagcgctgtgagcggcatcgcggcagcttgcgcgtccgttaaattctgcggtgcttttgcgacgattcgttcatccactaattgatattcgctattactacctggtcgtttaaagtccccaacataaaagacacgatcacccggtttaaataacgtgacggcattgccaattcctgtgacaatcccaacagcgtcccagccagaatacggggcgtttttgattgtcctctacccccttttcgaatgccaacatctacagggttaactgaaacagcggtcacttgtacgcataaatcgtgtggttttggtttgggactggggagattaaaagccattaaactttcttcatttgtaatcggtaaatgtttggtaaaaccaattgcttgcattaaaaatgccttctttcttattcaccattagtctaaaacattaattgccccgtaacaatcgtatatcgaatgtaactagttacattgttttcactaggcaaatgactgctagcggactataatggcggtatcaaaggaggccatttcatggttcaagaacggcacatttatgattgtcaggcgggctgcccggttgaaagcacgcttcaaattatctcgggtaaatggaaaagtgtgattatttatcaacttttgcaacattcggatctccattttggtgatttgacgcgcattttacccgattgttcgcgccgcatgttagccctacagctggaagaattaattgcggatcatgtgattactaaaatggtgattagtctccggccgttaaagactgaataccaactctctgaatttggtcaaacactgagtcccgtgattaacgcaatggcaacttggggaacttattataatcaggttgcacaacaggatgttggatactgtaatttgcagtaatgcctaaatttggatattcgctaaagcacttgacaaattaacttggataatgtaaaaatatagttgttaaaagtataagtaaactttgataatgaagtggtgcatattgaaagaaacgaattatgtcgaaaataaagtctatgaataccgagtactccaacatctttctcaagaaaaattaggtcaagcggttggtgtttccaagcaaaccatctatgcaatggaaaaaggcaactactcacctagtttgattttagcctttaagctcgcacgattttttgatgtaccaattgacgttctattcacttatcgggaggcgtaacaatatggcccctactacactttttaaatcaaaatgcccatgtaatcgctggtgtggcaatcggattaatcatcatttcaattctgtttttctactatggtataactagaattggacgttcggatgaacgctcacagcttattatgtatcgcgtttttaaaacgatgtttgcagcgtgtttattatcgatgattttatttatgacttttgtgccagaccgcttaacagcagttcgagattggtttacaactctattcagtcttgtatttatcagtggcgcatgcgctgtttttattgaaccacggcgtaaagtttaacccttaaaaaaaaacggtttagtcaatctaatgactaaaccgtttttttaatatgttgtttttcgtccttttggaattaaataataaaagataccgattaagatgagatcaatgatcatcaatccaataaaaatcgctgttcgacccgttaggtaaaagaaccaactaccaattgagaagccaatgattgagctaacaactaggtgcagcgcaaaaatttgggtttgtgccacgcggaatttacgatataaaccagtgctgagccctttttgtgcgtgataaccattgataacttggctaaataaataagtgaaaccgaccgcgatgatcatgaggacggcaattaccgcgattacacccgcattttgacggagccagttgacgccgactaacggcgtcgtcttcggtgttaaataactgtgcttagtcgttttgaaaatcttttggtaagttttcagatgcgctcccatctgcggaccatcaaccaatacggtgactttattcagtgggcgatcatttaatacaaattctggtgacgtggatacaaaaatgtgctgatcaagcgtagttgtctgattcgtaccgacaacgccaatcacggataagtagcgaccatgatcttgataatacgcttgactagctggtttgtagagttcagcaagtcgtgattgaccagcaacgacgactggaatctgtgatttgaaatcgtaactggagaagaaccggccgtcttttaatgggacactcgataacttccctttcgcatagacatatgagaaccgggaatcaacgttgaattgaatttgaaaatggcttaatttcgcggcatcaattttttgaatggttttttgaatcgactgttgactcttagaattaaaaatcacagcattttctgataaactattgtgatttaagcgttggctatagttagtttttgcacgttggctaatcgttaacatgcctagaactgttaaaccaactagtaaacaatctaatattatttttttcaggcgcacagtgggccctcctttaaagcagactattgaatccagtaaaaccgatcacgcattaaatcgaatgggcgtaagtaacggttaatccgtgataaacgggcgtcgttgtgataatgggccgccgtccaaaaggcgtgactattcgtggcgccaaaacgttcgcctaagcacaacaaaacgggggcatttggcattgcacgaagttgttgcagcaattcataatcaactgggacgccgttgggtgaccaggacattaagactgcatcgacttgcggaccatattttgggaccgcttgtttggcgtcaagagctgccactgacgtgactaattggcgccctgtttcattctcggcagtccaggctaaactatcggtacaaatcacatcagcgcctgcctgccgtaaaccagcacttaaatagccgttaccagccatgacttctagaaaacgccaattgggaaactcgcggacaatcgccgccgtcaaatctgtagtgatataggcccacatgccaaagcgattttgcaaatattcacggtaattgcgcagtaagtggtcgattaactgtaactgacgttgaacctcagccacactagcggcgctaaaagccccctgttcagcctggagtaatatttctaaatacagagattcatcaattcccaaaacgggtaaattatgtatgggcaagccgtcctgttcaatctgcaataaactagttaaaacagcatgaatttgtacttgaatggctgggacggttgcaaaaaaacgttgactctggcgcaatttctctggataacttaactgtatcataatggattccgtttctaatataagtttctcttaaacgattagaaaaaccttcccaatcggaaggccaaatcgaacgttttaacgaatcccgagtgcaatgcgtgcataacgggacatcttgctggtatcccacgctgggtaccagacgagattgactttaacttcattgacttctggaattttgcccattgcttgatgaatcgaatccgttaaaacatcggttaagggacagcccatcgttgtaagggtcatatcaatcgtacataagccattttcatccaggtttaaaccgtaaaccaagccgagattcacaatgtcaatcccgagttctggatcaatcacggtctcgagcgcggctagaatccgttcctttaagtcttcaattgctgcatcatcttgtggttggtctgccatgtgtcctgcctcctggtcactctaatagctctattatactggttcaaccgaccagttacaactgacgatcattgacaacaatccgcataccccctagaataaaaagacatatcgtgttttaaccaaacacgtttttaaaaggaggcgccgctatgcatcaaaaattgattgcactggatttagatgggactaccctcaattcagatgcccaaattacacttaaaacgcaacaaactttaactgaattacaaaacgctggccacattgtcagtattgtcacagggcgcccaaatcgtttgagtgaacctttctaccaacaattaggtttaacgtcgccaatggttaactttaatggggctttaatgcacattccgggacaagcctgggccggtgaatatcaatatacgattaataaagacattgtctttagtctcttccaactaaaagaacgctttaagattcaaatgattgccgccgaaggtaaaacgatgtttttagctgatcaagcttatgccaacacgttttctttcttccccacaacgttgaagtccgatgaaattttaacccgcgaatcgcttcggcaagacccagcggccgtcacggtttttgtggaacgcgctgatcaagatgcgttacgtgctgaaattctgcgccaattccctgacgtttccgtcaacacttggggtggtcctgctagcgtcttagaaattgtgcatcatgggattcacaaagcaaccggcctcgcaaaactagcggcacactacgacattgatcaatcagatatcattgcctttggtgatgaaagtaatgatttggatatgttagcctatgccggtaccggggttgcgatgcaaaacgcaattgcaccgatcaaggcgattgcagacgacatcacaccactgacgaatgcgcaagatggtgtggtcaattatttacggcaatattttaagatggattaatgaaaaagcgattcgacaatttctggtcgaatcgctttttttgatggatgaaacgtgcttttcaagctaactttctgtgcttagctacatccgtcaaatcaccgattttgtcggtaatctgcctgattaggctaatcctcagaagatacccggcttattgcacactctattctgaaacgtgctccgtcagatatacacttccggttagttacataccgcaaacgatcggctacgccgctcattcacggtattagactaatcctcagcgtatgaccatctgacgtcgcactctatttttcgtcgctctttagcacgccgcctactgagtagcggtctggttgcatttcgtttaggacaacgtgcacgtgttctgcaggtgcgcctgtgtttttagtgattgcttctgtgacgtctgcacagagttgttttaattgtgcttggctccggccagcgattaaatcgatgtgtactaatggcatgtgtggtgcctcctttaattgaatacttatattatgcctgttttaacgcaattgagcaacggtaattactgtgtttttaagcaaaagaatgtataataatagctaatattgatttatctatggaggcattacaatgagtgaacccctttaccgtcaattgacggcctgtaccagtgttttagttggtaagaaagccactgcagacggctcaactttaatcgcacgtaacgaagatagccaggcagcttggcctaaacatttaaccatccatccccatcaaaagttaacgactgccccgcactttgtctcaaaagacacgggtttttcaatcgatttaccacttgaagccgcaaaatacacggcgacacccgaatggaccgatgaatatggactattcgaagaagacggcattaacgaatacggcgttgcgatgagcggcaccgaaagtgcttatagcaacagtcgcgctctcggctttgacccctacatcgacaacgggattgctgaagaagccatgattacagtcgtcttaccttacgtgaaaacggcccgtgaaggtgttgcgcggctaggcgccatcgttagtgaatacggcaccactgaaagtaacgggattctcttttccgatgtcgatgaggtctggtatcttgaaatcggcagtggacatcactgggttgcccaacggattccggatgatagctatgccgtggttgccaatcaacttgcgattcaagaagtgcaattcgatcaaccggattggttcatgacttcagaggggattcaagattttgcgcgtgataatcacctatggcaagctgatacgccatttaacttccgcgatatctttgagaccaaagaccaaagtgaccttgtttacaacacaccgcgcgtttggtacggtcaaaaattgttaacgccatctgtcacccaacaacctcaagactttaacctccccttcttacgacaagccgatgcgcccattcaagtcgaagatgtcgcgcgaattctaggctcgcattatgaaggcacggtctacgatccaatcggtcacggcacaccacaagaaaaacatgctttccgcccaattagtttagcaaagacgcaagaatcacacattctccaaatgcgccctaacttaccggttgatgttagcggtattcattggttatcaatgggtgtcacggcgcaaagtgtttacgtcccattctatgccggtgccgatgacgtcccagtcaattaccaaaaagggacaaaggattacagtcaagattcgatctactggacctataaattagctggtattttggtggatgcacactacgccaagttcgccaaggacttggaacaaacgcaaaaacacatcaatagtttgatggttcaaaacatcgtggcaactgatcaagcggttgctgctgaaactgatgcacaccaacgaaccctgttgatgaccaaaggttctgctaaggctgcacaacttgcccaacacgaaatggaacgcctcaccgcaaaactgattacggatagcgcgaacctatcaccactcaactttacaacggatagtaatttatagataaaaatggtcccacatcgtattttgatgtgggaccattttatttactcagcaatcatctctctaatcttgtaagttccacttgcgtatctaacttctacccgataaggatgtccatggacaactgatttagaaggagtaaatacatttccatttagggaaccatagtagttttggccattggtgacttctgccagatagctgttgtttcctaatacgactatcttataatgcttaaataattcgttagcaaaggtaacgacgattttattatttttaacactcatgtcagcaactaaagtgttcaagaacagttgctgtgcatggttaattctttgagtcaatatcgtcttttccgagcccttaactgcgttaatttgtgttcgtaattgatctaataggtcttgtgtgacctcagatttcaactgatcgtttgtttcaaataacgcttcaacttgacgtttcagaagaagaatatcctgactaatcattttgagaatgtaagacttgtgcggtaattcagccactacggtaacaacatgtgcatccgcttggttaagaattgttaagacattatcgtcgagctgaccaccactactgataccatttttgacctctgcaactggttggtcgtcaacaagtaccttaattttcgcatagtctttaaacttctcatcagtaaacgataccactaatgctgattgtgaatccagttgaatatctttgactaatgtagctaggtatttgtcttctaattttgtaaatagttctaagagtttttctttatagtcaaaagtagaaggaagagcatcaattcgatttcggagagcatctagtttagcttgggttagaattgtaccaatcggttctgatgcattcaaatagtttaataactcttcttcaagtgcaatactatcaattgagtgttcatatcgtttaaaagtaccatttttattttgctgttcaattgtaatcacatcagtcggtttaagcatctcgattgtttcccaaacattatttgttaacatactttcaattggctctttattgacgagtttggaaatcacttgtccattctttttaaggattaattgctcatccttaaatacatcggtttggtagtcagtcaggttaacttgaataccgtggtcattcagcgatacggtgtcgattaagcgcatgggtaactgtttattagtttctttatcatttaaccaaatagcttctggtaaaggtgctaattgactaatttcagctttaactgctgcggaaatatcaaatccccattgttcgaaataaggctgcatattataacccgtaattctagaaacatttagaacaaagttttgcatccgttcattgtctggtccaaatgcaagcttgttttcacgatagtactgatgtaaaacggggtaaaagttatcaccaaatgtatttcctaattgaccaaacataaccatctttaaattattattttgtgcgttgaattgcttattatcagattttagataagtatgcatttctgggtagtattgatctaacgatgttattttaccagtcaattctttttgagccgctaatgcataaatgttaacacttgattctacaacagcaccccatttccaaggtgtttgttgtctctgatgaccactttcatgccagatgctccaaccttcatttgtcttcagtagtcgttgcaaagcgcgatcattatggaagcccataaattcattttctgtatacatatacaacttaggtgactctaagaaatgttggagatggcgatcaacaaagtttactggatttccttcagtagtaatgcctgaaacccgatcttgtgccgttaaaaaccgatcataataagtcatcagttctttagggtcaccgagatattttttagccattgcgtaactaactgtaattaatgctttgttactgaccaactgcacatctttagcattcgtcatttccgccatttgtttctcaaagtctgcgacgctagtttgatttaaatcgaaatatggcattgatcctgttgcccctgatattgtgattgttgcttcaccagaatcattaggattagtcacataaatcgggccctcgttttcaacggtaatcgttgtaatgccctttgttaatggatattgtttttgattttctcgttcgggcgaaccaattgtgatagataatgaatcttgcatcccctgagcaactgtcaaaacatcccctttttgggcgtataaaccgctaggctctaaacttgagtagcgtaatgttctgcgttgccggtctttttctttaaaaacatcaccacgaccaatataggttttcatttcttgtggtgcttttagattttgctggtgcctcaccttggatttgaggctatctgctagcacgctactcgctaaattttggtgattgtcacttggttcagccttaactgtttgtatagaactgatggtgctagttgttaggattcctaacgctaaaattccgattacattcttgatagtctcatcccctaaaagtattattatttttataacatattcagattagcatggactgctgaaaattgtctattaaaaaaccctaatgatttctataattattctattaatattaaaaatgtcaataatgataactacaactattacatttaagaataaatcgctctataattgtgatgacagtgtttacaattgtgtaaaataaaataagacccaccacttattaagtgatgggtcttattttattcagttataaatgtattataatgaacacccttattaaagtaattccgctaccaatggccaattgatcatcttccaaaagttttcgatgtaatcaatccggttattctggtatttcaggtagtacgcatgttcccaaacgtcaagtccaagtagtggtcgattacgactcataagtggtgaatcttgattaggcgttgtcatgatttgtagttcaccattttgatcgataacaagccatgcccagccagagccaaatacaccaagggcagcttcggtgaatgcttcttggaacgtcttaaacttcccaaagcgggcttcaatccgttcgagtaattcccccgttggtgcttctggcgcattcggtgttagaattcgccagaagaaactatgattggcatggcccccagcattattgcggacaggtgtttgaagattctcaggtaaatcatcgatgtgtgttaacaaatcatgtaatgatttacctgctaaatcggggtgcttggctagcgccgcgttgagttttgttacataagtcttatgatgtttgtcatgatgcagatgcattgtttcagaatcgatatacggctctaaggccacatattcataaggtagtgctggtaatttaaatgtcattgttcaccctccttgttataacctcatcatacaagtctatggcgttaaaaagcgaataatatgattctacgaccattgaaaaaagctgactaatgtttattagccaactttttttgaatcctgggtagctgcgtatcgatttctgccaacatcatgttcggtgtcttatgttggaaaaaaatggtgtagtccgcaagccgataatactttggtcgtcgtttgtgatacagttcgcgtaaaccatcgtgacccaattgattcacaagtggccgccgatcattgcgcgaaacgcggcgccaatgtgcttcataactcccatttaggaaaaaaatggggatatgactctgttcaagtaaatggcgcgtctgagcatcatccacgaccccgccgccggttgcgataatcccatcgtgttggatcaatgtctgtaaggcctcaaattccatttgtcgaaatgcagcctgccctttttcggcaaagatttcgttaatcgtcatttgctgttcttgcatgatgtagcgatccaaatcaatccagtcacaatggtaatgatgtgcaactttgcgagcaatggtcgttttaccagaccccataaaaccgattaaaatcagttgcatctagtcaatcaacccctatggttctatttcaaatatattgttggttccaagactgctccgcacatacggtcagttaaacactctttacaagttagtttcattgtaaggtatctgtgggttggttaccagttttttttgaaaatagattagccgctaaagtcgttagcggtatggattgaatttttggaacaccaattgcatcgaggtaaacaagattaatggcatctccttgattcttcttatcatgtaaaagttgcgtgaagagtcgatcactcataagtaacgggctatctgtcggcaagccgaccgcatttaaaacagttgtaatcactggtgttaaatgcgcttcagtcagtccactttgttcgactaagtgctgcatggcaactaacccgatgctgaccgcttcaccgtgcatcaggctgccattggccagggtttcaaccgcgtgaccaatcgtatgaccgtaatttaataattggcgttgattactttctttttcatcggccatgacaatctgtgccttgtagtgcacactttgctgaattagtgtttcagcctgcgctagaatcatatgcgcactttgaatccctgtcacctgttgccaaaatgtcccaccgttgagtgcagccactttaacgatttccgcataaccggccagtaattggcgttgatccagcgacgttaaaaagtcgggatcaatcaatactaaatccggctggtaaaaagaaccaactaagttcttgccagctggtaaatcaagtgcagtctttccaccgacactactgtcaacttgtgccaaaagcgaggttggcatctgaataaatgcaaccccccgcatataggtggacgcgataaaccccgccaaatcaccgacaaccccaccacctaaagcaatcaccccgtcatgacgggtaaaattcgccgctgccagttgggaataaagtgccattgcttggtcaagtgatttcgacgtttcaccagctggaataataatcggtgtgacttgatagccagcttggattaattgagattcgaccgtttctaaatacaacggggcaacattcgtgtctgtgattaatgcgatttgacgaggtgtccaaacttgcgcgatttgttcagcacagatgtgatacaaatcagattggatccgaatctgataatttttttgtgtgaggtggacatcaattatcaccattagtgccgccactgtttgacgactgcatcaacggcccacacttgatgacacatttcaagataagtagctggctttaaggcttgtgcgccatcagaaaaggctttttctggatgatcatgaatctcaacttgtaacccacttgccccagttgcgactccagcccgagccattggcgtcacaagatcccattcaccagtcgcatgactcggatcaattaagactggatagtgcgttaatttttgtaaaactgggacagcatttaaatcaaatgtgttgcgcgtatagtgattgtcaaacgtccgaatcccgcgctctaacagcataatttgttgattaccgttggcagcaatgtactcggcagcatttaataaatcatcaacagttgctgctaagccacgttttaaagcaacgggaacgttggtttttccaacagctttcaataatgaaaagttttgcatattgcgcgccccgatttgaaaaatatcggtatattgcgccactaaatcaacatgcgtttcatccatcacttcggtcacaacgtccatttgataagcatcagcagccttgcgcaatgctttcaaaccagcttcgcccatcccttgaaaggaatacggtgatgtccgcggtttatacgcgccaccccgcaaaatagtcgcaccgccttctttagcaactttggccatcgccataatgtggtcagcagattcgaccgaacaaggacccgccatcaccgtgaagtctgcaccgccaatcgtactgtgtgctaattcgatgaccgtgttttcgggttggaatagccgactgccaagcacgtaactcggttcatccgtggtggttgccgcaatgacttcttcctctgcttgggtaaaatcaattgcttttgcaccgatcaccgctacatggtgcttaatctgatagacattcggatttgtcgtgcgttgtcgtgcgcaaaaatcatcaatcagcgctgaatcagtatttggtttaaattgaataatcataaattattaaaactccttcgttaaagcatgatagatgggatcggtttgtaggacctggcccgtccagaattgaaaactcaacgcggcctgttcaactaacatgccaagcccgttttgggttggatgaccacttcgagccgctaactgtaaaaaagcagtctgacgtggcgcatatattaagtcggcaactaaacaagtcatcggtatttgaccaattaaaggtgctgccagcggtaatccaggggtattgaccatgccaagattcgtggcgttaatcacgcaatcagcattactgagtgcttgttggagtgcctgttcatcggcataattatgtagcacgatggacatcgaatggtgattagcaatttttgccagtcgttgttcaaccaccgcataagtcgtattttgacgtttgaagacctgaatcgtcgccacaccatagcgagcggcggcttcgataaccgcgagagcagcgcccccaccacccagaataacaatctgctgactagctagattgggatatcttttctgcaaagcgcgccaaaaaccatcgccatcagtattcgtgcctaccaatttacccgatcgtaaagcaaccgtattgatggcgccaacgagttgcgcagttggcattaactcgtccattaatggcacaagcgactgtttatagggcattgaaagattaacgcctgccacaccaagcgtccgaatcgcttttgcgacatcttgcggccgtgcttggctatcgaaaaccagataccgcgcgtcgatttgatgttgtttaaaacccagattatgaatcatgggtgacaagctatggtgcgctggatgcgcaaccaagccgtaaagagctgtataacctgatatcattacattttcctctaaaactatcatactttacttaatgagatttttaaatggttagtatcaaaaagtcatgcttaatactgttattttttgtcattatccggtaagattaacatagattgaaaacggttaatataatagaaagaggtccttaataatgtcgatcgaacgtcaaacgttatccgttaaagaacaagcatttatagttgatgcatattggttaacacccattccagatttcgagcatccagttaaacatcccgtcatgattatttgtccaggcggtggttttacgtatcattcaggtcgtgaaacaacaccggtcgcgttgcgatttttagcagaagggtttcacgtgattgttctcccctaccaattaataagttcgactgaaaccgtttatccgctcgctttacatcagcttgctaagacaattgagtgggtgactgatcaagctggagaatatgatattgatttggatcgaattgttttgactggtttttcagctggtggacatgtggtcgctacctataatggcattgcgaccgatccaatccaccgagctgattacgggttagacgattaccgtggtcatcatgcagcgattgtcttaaattatcctgtgattgattttgacgctggttttccaattgatgatgcaactaagcaacagattacagtggaccaaactttatggcacgcacaaaaaaatatcacagcagcagctaaaccagcttttatttggcaaacagccacagacgcccttgttccagcaacgaattcacttctatatacacttgcattacagcaacataaaatccctgttgaataccatctctttggagctggtgttcatggcctttcgcttgctaatcatgtgactcaaacaccaggcaaaccagaatatgctaatactgtagcagctcagtgggtcccacttgtattggactggtttaaactgatggcaattttataagaacctaaaaagcaatggatacagtaatattaactgcatccattgcttttttgcttatttacggtctgccttattagcaatacctaattcttgacgatatttagcgacggttcttctagcaactttaatgtcatacttaacttttaactggtccgcgattttttgatcagacaatggatgatgggcttcttcttccttaacaactgtttgaattgcaatgtgcgtctgtgtcaaggtgggaccttcctctaaagttgtactccgtttggtcaacaaattccgcagaagatagataccattaggcgtccgaattgatttttctttaatcgttcggctaattgttgattcactgagctgcaattgatttgcgatatcccgtagaatcaattgattaggatatgcttgttttccagtaatataatcccactgtgccttgattaggacttcagcaaccattaataatgtttgcccgcgcttatgcaaactcgtgtttaacatctgatactcggcatatttttgctgaatgtattgtttggtagcgacatcgacttctttttggaactgcgcgtaacttgcatgttcaaaaatcagcgttggtcgcccaaattcagtcaatagtagctgatatcgtgagccattcatcttaataatgacatctggcacttgaaaattagttggtgagtcatcaaacatatttcctggttcaagactcagtgcacctattttgtgtaaaatcgattgcatgtcatcttgactaatggctaactgagtttgaatttgtttaatatcaccagctaataattgttcaaaataatcagttatcaccaaaatactaagatcatcagccggataaatagcagaggcctgtagtaataacacttcttgtgcatcacgaccaccaaccccgattggatcaagttgttgtagtaacgtcacaacgtcttgataagtggtctgatcaatttgattttcttggataaaacgggcttcatccacctttaaatagccatttggttcaacctccaaaatcagccgttgcaaaagttgctgtaatttacctgctttaaaccgataaccgacttgttccaacaaataatcgtataaattacctgttccgtgagccgctagctgatcaaaattgaattcttttgtacaggcttcgacggacccgacctcaaacaaggggttctctaaactacgagcttttaaataatccagtaggtcgagactattagattgcaaaatttttaaggattgttgcaatgattagttaaaaaaacactatccaatcggatagtgttttttagtttaacgctttaattttcgcgattaacgcgttatttttaaggtatttggcaaaaactaacgcggtttcgcgatcttctgcatagtctcgaccgctttgttggcgtgcccgagcacggaggtaatacaaatgatcgacttgtttgatgatttgatttttttgactcagtttgagggctttcgtcaaaaactcgatagctgcatcaatgcggtgttggttaatcatataggctgctgtgtgacgcgaagcaaataggacgcgttgaacatcaatgacattgatgtgatcaagttggttgatgaaattgatattgttattgaaataaaaatcagctaattcctcgccagcttcttggtaaattaaacccatgccggtatttagaagtaacttcaacgttgaagtgtcgtcaccgatagccgctgtgaacgagttataagcggaaaaaatctgtaattcagattgatggtcaaggtaacttaaatagccattgaaaaagaagaagacggcgggataaggatgttcggttgccttgaagtcgatatcggtaattaatgcggcagcagggccagaatcgcctgctaataaagcaacttccgcagaaatcacgccttcgtcactggcagtgtcgagcgcgttaaattcggtgaaaagttcatttaatgtcaatccaagccgtgtacaaatcttaattagaattgggattgtggggggtagatttttcttttcaattttgctgattgtattttgcgtgcaaatccccgctgctaattcagactgtgtcagttgcttgttgagtcgctgttgatggatcaattggcctaaaaacatttttagcctccaaatagtaattatttatctatatttatgattaattatatacgtttaatgcagacaagtatacgtttatgatatttaatccttttaaaaaaattacgtgataaaatcgaaatgagtcaccaatcatgggtattcataatatgaaaggaggggtatgataatgatgagtaacattcaaaatttaattttctggttttggaattaaggttcgagtagggagttttatgcatggcaatgaaaatgccgctggcaatgcagattgtcattaatctaagtacgtttagttcgtttctactattagtattatttttgacggggaagttgaaacgaacgaacagatttcaactactattatcagttggagtcggcattgcttttgttcagggaatggatttattaattggaaattttcttgaagagctatggctgattttggcaactgttggattatatggttggttaaatggctttaaaaatctgcgtaaattaaagacaagttatgcgttaattatcgcaaccatctttagttacatcatcgtgatgctatcatcggttctaacaacggtggggttaattgggtatactcacttaaagggccttgataatctgatgagtagccagtttaattggcaaatggtgtgtttaattatgttgagtcaattattgattgcagccggattaggattaattgtccaacggttagatcagcttattaaagcatccattgcttcatacggtatgtgcgtggccggcacgattttagccggtctcgcgttatttgtggtggcagtgatggtgctttttgatagctttaagcatgcgaatctgccggttgaatatttgtaccttgtgttaggacttgtgctattactattagttttggtgattgtgggaatgcttttgtatacgaaagctgtgattcgccaaaatagaatcaacgtagaacaagaaagtcagcgaaatctaacgctgtatgttgaacagttagagcgtaactaccgtgaaatacgcaagtttcgccacgatatcgccaatgctttattggctttagagacaattatcaatgaacaagggagcccagttttaatgcaggattttcatgatttactaacgcattataactttgacacgattcaagatcaggcaattggacggtttcaagagattaataatgcttatattaaaggcattatttttagcaagtatattgaagcacataataatcggattccctttaatttagaggttcaaccggatttatttaagcaacaacaacagtattttgatgaattacggattctgggaatctttttggataatgcaattgacgcggtaaatgatattaaagatggttcaatcagtgtcagtttattcgagcaaaagggtaagatggtctattgtgtcaaaaatatgattaatacaccagtagaatttggtcagctttatcaggctggttattcaacgaaggggattaatcgcgggcttgggctcacaactgctaaagaaatcacggatatgcgctcagattttagcttaatgttaaaacaagatggagactatttcgttgcaatgcttgttgttgaacaggaggagacccatggttgatatttttttatgtgatgataaacaggttttactagatagttatgaagagattataacggcatatattcaacaaaatacattggatgctcaggtgcgtttgaagactaagaatggctatgacctattaatttttttacaagaaagtcaaacgcaagggggcgtttactttcttgatattgatttagagaatgacgtgctggatgggatggaattggcgcttaaaattcgtgaattggatccatatgcacagattgcgttcgtttcaacgcatgacgaacttttaatggaaaccattcaacgccgaattaatgttttgaattttattttgaaggatcgcgggttggcgcaggttcgcgcagatattcaagcaaccattaacgatgccattaagttacgacaacaacaggtgccgttagctgaagaaccagcttattttgaatatgatgatggattatcgtttgaaaaagtggcaattcaagagattaattatttcgaaacagcgcataaagcacggcacgtcttcttacacagtgatcatcggttaagtgaatttgtagggaaaatcgtgacgattcaagcgcaattgccacaatttttcagagcccataagagtatcctagtgaatccggacaaagtcgtacggattgataaggagacacatcaagtgatatttgcaaatggcgatacatgcgatgtctcgtaccgtcgaattgaggcattacttaaattgatacaagcagacaagtattaaaaattaagcaacgccaaaaattcgctttcaaacgtggtacactaaaattgataatggatgacagttttaggaggctacggattgaaactatatacaaagaccggtgacaagggattaaccagaattatcggcggtcaaaaagtgcgcaaaaacgcaattcgtgtggaagcatacgggggtgttgatgagttaaattcatacttaggtgtcgtcatcagtgatttacctgattatccggcattgagaatggaattggttgagattcaacaaattctgtttgactgtgggacagatttagcgacgccggatgattcgcgggggtatcggacagacaacgcatacacgaaatggttagaagctaagattgatcagtatgcagatgttccacctgctttaaaagaatttattttacctgggggagtaccatcagcagcgaaactacaatattgtcggacaattgcgcggcgtgttgaacgccaagtcgtcgccttgcaggaagtagaaccgattaacgaagctgtattaactttcttgaatcggctctctgattatttatacgcgattgcgcggtacgtcaatcatgaagagggcgaaccagagacagtttatcgaagaaataaaacaatttttcattaaaaaaaccgccgatgtgcggtttttttaatgtcgaaattaagggatgttttgaattgctaacgcagcaagcttccactataatagcttgaaaagaggaagtgattgtgatgtttaaatcaaaagaagctaaagtcgaggtttacgaaatgctcttaaaacaacaagctgctttgctggcaggtgaaacgaatttaattgctaatctagcaaattcttcggcgttattaaatcaaatattaccggagactgtttttgcgggttattatctgtatcaagatgctgagctgattttaggcccatttcaaggaaacgtctcgtgtatgcacattgcactaggtaaaggggtgtgtggtgaagccgccgcaaagcaaacaacgttaattgtagaagacacggcgcaacatcagaattatatcgcttgtgattcggctgcacgttctgagattgttgtgccaatgatcaaggctaatcaactaatcggtgttttggatcttgataaccgcgtcgttggcgcttacgatgaggtcgaccgagattatctagaacagtatgtcacgttactgatgcaaaactaaaaaaagcaaatgcgtttctaattgatgttagaagcacacttgcttttttttaattgattagagtgtcttgattttttgtttgaggtggacgcaaacctgtgtcaccacaatgattgccaagagccggtccagataatccgtaccggcttgaaccagtgtaatgctgacaaactgatttagtcccaagccgcttagtagttgtacaattaaacttgaccctgaagaggtgataccgtggaacaagaagtaagtaattaatgaactgacaattgtgccgggaatggcgacacctaaagcaacaaggggtaactcgcgtttcgtccgttggtggtggtataagaaccatccagcgagtaagccggttaatagaccgtctggcaagtaataaagcgcaaataagtcggtcgtgacaccgctgatgatgctactgcaagtggcagttaatgcgcctgccagaggacctaatagggtgctggctaaaatggtgccgacgctatcgagatagattggtaaccgtaaaaatagggcaatgttagcgcctacgtaattgagtgcaatggcaagtgccagaatggttaagtgttgtgttttaaattttcgcataataggttccttatctaagttttggtaagtccgttttaatgagggttgcttgtgcatttaaaacgacggtcaaaaactgttcaaagaaacgattggtgtccaccttagttaagatgaggctattggcaggacggtgccagaaatcgaaccggtcaaccagtgtttggccaatgctgatgccggttgtttcgacggtggtataactttcaaagccgtgacaaagggttggatcgataaaataggcgactgctaatggatcattgatcacacagccgataatgtgttcatattgccaatgaaaatcaaaataaaactgggtgatggcttttagatagtcgccgacttcaggattgacacgctgacaataagccagcaatgttggcgtgaagacaatttcgcgggtcacgtctaagccaaccatttcaatcttttgatcgagttggtcgaataccaacagtgcggcatccggatcgctccagtagttgaattcagcaacgggtgagcagttaccgtgactcttataggtcccacccattgaaacaaagcgggcacagtgccgacctaaatctggattccgctggagcgcagtcacaatattggtcaatggtccgagtgcgataatactgatatcgctcggttgactaaaagtggctgctaaaaaatcagcggcggattgttgtgccggttgaatagtggataggcgcgggatatggctgtcacctaaaccatccatgccatgcgtatcctgcgcactgacaaatggtttatggagcggtttatccgcaccaacataaacgggaatgtcgagccgcccgaggcgttcaagacacttaaaggcattgtccacgccgatttggacgggaacgttgccgcaaacaatggtgattgcaacgacttccaccgctggcgattgaatggccaaattcaaagcgagcgtgtcatcgatgcctggatcgcaatcgataatgattttgcgagtttgcatttatttctaacctccttgagatccttagttttttattctgggaagtttccgaaccagtccaagtagttttacttgattttaaatgcacccctttatgataccgagttggtgggcgggtgtaaatagcagttatttttaaaaaacaggcttgacagtgattagcgaacttgatattataataaacgttgtaagatttgatatggagaattacccaagtctggctgaagggaacggtcttgaaaaccgtcaggtgggttctgcccacgcgagagttcgaatctctcattctccttaaagtaaaaagcggttcgcggatgcgagtcgctttttttgttgggtaaaataaaaaaccagagtgcatgcgcactctggtcgattcggtttaaaattagtttgtgtaggtttggaaacgacttgcatcggtattgtagtctttagcatcggctggattttcgattgaaccaaatggcatttgcgcacgaagtttccagtttgatggaatgttccattttgcagtaacggcttcatcaattactgggttataatgttgcaagctagcgcccacatttttttctgccagggctaaccaagtggcatattgtgccatgcctgaagcttgttctgaccatgttgggaagttttcggcatataatggcacgttttcttgaagattcttaacaacgtcttgatcttcaaagaacaagattgtcccgacaccagcggcgaatgaagccaatttagcttgtgtacttgggaagttttccgcaggtgttaatggttttaaggcagttgctgtaatatcgttccaaagtgtttcatttgcttttccaaagagaataatggcgcgtgaaccttgggcgttaaaagcagttggtgtttctttaatggtgttgaagattaattctgataattcagcttcgctcattgaaacgtttttgccaagtgcataaattgtccggcgtgtttgttgtaaatcgaataattctgtcatgttcattactcccttgtgaaatcgtttttatcagtgcatgcgaataatatagcatacttattaaatgtaagcaatgaaaaaagcgaaatccctcgtttgtatttcgcaattaacagcatttagttcgattgtattttacaattatagactagactgcagtttaacgggcaattcagattttgaaacgacagtccaagaattgacgaagcgccccttggcatctaattttaagtagtgattaggttttagtgcgcgcggcgcttggaaaacgacttcgtaatgactgccatcagcacggtaagcaggttgccggtaaaggtaatcgccatgtgcttgttgtgtcccgtattggtgtgctgttttaacatagacggcttctctgggaattaagaggttgaaccggtcccactgttgggcaaggtcattgccgtccgtcatattctgagttgtggctgatccgataattggaccgccgataacaattagtccaagtgagaacagtaatagaatgatttttttcatgattgacactccttgtgaattgatgtcttaatcgtatcaagctagaagttacattgattcagtctaaaggtggaatttattctaagcgaggtgacgattttgtcatatcgtgggcctgtttaaggattgatagtttatgtctgtggccgaatgcattataatagttagttatgagatgttttcagtagagagtgggtgatgattgatgaaggaagttcaaaatgtgatgcaacagttagacgcgattcgtagtgcattgattgaaggggacatctatcaatcaattccggaaaaagtattggtcgtcatggatggcgtccaatataagacgcggcggacacatgtcgtagtacctgaggacaacgagtcagtcttgcaacgaatcacagcaattgatgagcgaattaaaaccaaaggcaaagaagcgaccatcagcgatgaagagctcgatgatttattaaggcatcttgcaagcccagattcgcaagtgcgcgataaaggtgttttttacttattcaatcgattattacggcagacggttttaaccccagcccaattgatttgggtcaaggaccgcttattgcaagatgattatttattcgcgcatattttagaacctgaaaatgacgctgtttttttacgttcgtttagcgcgatgtttttggccgggattttatatgctaaccgcactttttatcatgtattaagtacggccgaattattggcaattgaacggcgagtaatggcttatacagtcatcgaattagattcacgaggatacgttgatggtaaaggctgggcgcatgcgatgacgcatatcatcaatgtctggtcagaacttaacgaaacacctgaaatccaacgtgcggataagattttgatgatggcaattgtgctacaggcgtatcgcttctctgataacgcactcgcatatggtgaagatagtcatctgacgaacgttctaatcagtttaatgaacaagcatcaactctatgtcgattattgtttaatcgtcttacaggagtggcagcgttcattgttgactatggcaccacaggataccgttggtttttggaatcggtggtataaccgcaatcgctttttacagtcattgttgctacaacctgaattacctgataaaattgcggattacttacggaagatttcagatttattttaattaaccagataggattgagagaagatgacagtaaaagggattatttttgacgtcgatggcgttttagtggatagtgaaccgtactattttgaacaacgcttagcatttttgaatgcaattggcgcacgactaacggcagaggaaagtcgtaaacaaattggttccaatatgaatgccgttttaaaacagttgtttccaaaccatactgttttggaacgagcggcaattaaaaacggctatacgtcgtataaagcggctcatccaatcgtttttaaaaatatcatgaacccagacgcgcaaccgttattagcaaccgttgcaccgacatatcaaatcggtttggcgtccgctggtgagcgcggaattattcaacaaatgttgttggaaaccgcgttagaaccttattttgaaacggttgttagtggtgcagagattgcgcataataaaccagcaccagatgtgtatctagaagcgcttaaaagaatgcatttagaaccaaccgaggcggttgcgattgaagactctgcactggggattcaagcggggaaggcggctggtttaaccgtcatcgcattaaaaccatttgatccacttttcgcgattgatcaatcggcagcggattatcaaattgaatcattaaaagaagttccggcaatattagcaacgttataaaaaacggcttccgctgcaggaagccgtttttttgtcgtactatcgaacagcaccttaacaattaattaaagataaatgtttggtaatgtttagtatgtagtgtaaaatacttattggataaaaaaataagtaatgccacataactagttcatagtgtataatgaacgcaactagtagcgtcattgctaattgatgtaaattacttaattgggttatattttccggaaattaattttaaattaaataatgatgtaattggagtatttaaaatgagaatattaggggataaactaaaacaaatccgtaaagcacgggggatgtctcaagcggagttagctaaggggatttgtacgcaagcaacaattagcttaattgagaaaaaagaacaggtgccaagcacaaagattctcttggaaatttgtaagcggcttgaaattacgttggactcagtgattgtgcaagaagatgatcaattacacgtcttgttgagtcgtgtgcaagcattgttatttaccaatgaattcaaaaaagcacgtgatttgattcagcagatctacacagatcaactggtcaaagcagatgattacaaacggtattattatttccaaggtcaaattaagttattgctggagaataaaccggacgatgcacttttctttttcaatcgtgccttcaatcaatacgttgtttctcagacggatgtttacggtattctatgtattatcggcattagcaagtcctatttgatgaagggcgctttagagcgtgtacggatttatgcagaacaagccgttgaaatgttggagaattctgatccacttgctatggccgatttccaagttgagttgcagatttataatcacttagcgggaattctttttgaattgaaggattatgaaggtgcgattaagtacgctcagcttgcgattgacgaagcaatcgataagcaaagtctttacttacttgatgcattgtatttcattcttggtcgtgcagaacatgcgcttcatcgagagaacgccttacaggatttaacggttgctaaaacattggcgttaatccggcatcatccagagattattgtgcaagttgatcaacaattggctgaataagtggttaaccactaaaaaaagccgggacataagcgtcccggctttttgattgctaatttatgcttcttcgtgaccaatgctactgcgtttcttgttgagtgcgtgtttattatctaaatctgtccgcacaacgagcacgtcgcaaacggcggtccgagtaacgtattccgttacagaaccaatcaagagacgttcaacagcgtttaaaccagttgcaccaatcatgatgagatcgatatttttcttttcgggtacttcgcgggcaattaaactctttggtgcgccatattcaatgctatagtcaacatcttttaagccaagttcattggcagtcacgatgtattcgtccattgttttcttagctgtttctgtgacttgttcaaccattgcggaatcaaaactagagatattttggaaggcgcgggtatcgataacgtgaatcaagtggagttgtccgttattccgaagggcaacttcaactgctttacggaaagcgagttcagcttcataagaaccatcgattgcgaccaaaatgtgcttgtattgttgtaacattgtcatcacctcatttaattttacatctttattatacgctagttcagtgccaaaagtaaatcttaaaggttagttgcaaagctaaggccgactaagccggcgattaaactggcagcaacgagcgtcaccaatgtccagactagtggcaatagccagtaaatcaaagccccgcagatcgctacaccgatgagtgcaatccctgaaaagtacatcaatcgacctaaatgccggttttcagttaaatcaaagagtaggaacttcttgtcttggtagtaacataaaatcgcaccaagtagggcgataatgattaaaaaaacgattatggcgatttgaatcaatgtgcaacctcctaaaataatcaacaaaaaagggccaacgtaaacgttagcccggtcaaagtcgttggactttgggaaatctagtggtgccgtagatgcttcccgatagttgagcccgctagaaaatgcaggtgggtcagattattattagacttggttccttcgcgaaaaagtctacactcgctaataactcatccgtcccattaacgaattacttgatcggtcaacataaggtgggaagacgcgcacaccttagaaatcctactattatagtagcacgctcgtgatgttaacacaacacttttgtaaccgttcacttatgcggactggcttggcgcaagcgttctagctgttgtttgaggacttgctcgtatttaccagttgcttttgcttcgtaataatgactacctaagagcttatctggtaggtaatcttgcgcgacccagtcgttgggataattatgaggatatttgtagtcgacaccgtggccaagtttttcagcccctgcataatgggcatcacggagatgatcggggacttcaccggctttgccagcgcgaatatcagctaacgcgttatcaattgcggtgatggccgaatttgattttggagataagcagagatcaatcactgctacggccagtggaatccgggcttcgggaaaaccaagttgtttagccgcagcaattgcctcgactgtacgggcacaggcttgagggttggcgaggccgatatcttcgtaggccattgtcatcaagcgccgactaatcgacattaaatcaccggcttcaatcaaacggcccatataatggagcgcagcatcaacgtcactgccacggactgatttttgaaaggcggagatgacatcgtaatgggcatcgccatctttatcatgagtaatggcttttttctgcacgcattcttcaataacgtcaatatcgatgtcgatgacgttggtgtctggattcgctggtgttgaacgagcagcgagttcgagggcgtttaaagcactccgtaaatcaccgtttgtgacgcgggcaaggtattgttcagccgtttcatcgagattgatggctagtgcacctaagcctttttctttatctgtcagtgcccgttgaatggcgacatgaatgtcggcttcagtgaggggcttgacttcaaaaatttgggcccgactccgaatggcagggttgatactgatatatggattttcggtagttgcaccaattaagataatgcggccactttctagatgtggtaagagaaaatcctgtttggttttatccaagcggtgaatttcatcgaggagtaaaatcacggtgccactcattttagcttcttcagcgacaatctgtaaatcttttttactatcagtggcagcattcagcatgcgaaaagcgtactgggtactaccggcgatggcactagcgatactcgttttaccagtaccaggcggtccgtagagaatcattgatgagaggagtttggcatcaaccattcggcgaatgattttttgcggccccactaagtgcgtctgaccgacaacttcatcgatgttagtcggacgcatgcgaaatgcgagaggttgttgcatagcgttcatcctttaatgtttaggttgttcctagtataacatgtcgcgcaaattcgtagtgattatcgttttaaaaggttttagggatgtgtataatgagttgtataagactgaattaagaagaggtttcaaaatgcctaatcaattatttgagaacattaaacaattacgcttaacacctttattgaaccaaggtgcttttggggtcgaaaaagaggggcagcgagtgaccggattgggcgcattgagtcaacaaccgcaccccagtgagttaggatcgcgaacgtttcatccatacattgcgactgattttgcagagatgcaaacggaactggttacggataccttcgaacagaccgtagatgtccaacaacaattattagcgctcgaacaagtattgcaatcaagtatggccgattcggaatatatttggcccctcagcatgccaccgttgttaccagacgatgaattaaccattccaatttcagaatacacaccggcggtaaaagcctatcgtgactatttgacgaagcgctacggtcgacgtctacagatggtctctggcatccattataattttagcctgtcatcgacgttaattgtgcgtttatttgatgaatactatcatgatcactatgtgagtctaaaagattttagcgatgcgttgtacatccagattgcgcaaaattacgtgcgttatcactatgttttaacgtatttatttggtgcgagtccgatagcggaaccaggctttttagaagatatgacgaaattaccagaacacccagtacggagtttacgctcgagtgaattattcggctacagcaataagcaattattaattcattttgattcagttgccgcatatgttgattcaatgcgccaagcgattgctaatggcgacttaatttcggaacgcgaattttacggaactgtgcggttacggagtcactcattggatcagatgttagagactggtgtggattatttagaatttcgggggtttgatattaacccgtatactgcgacggggattgatcaacaacagctagacttcttacacttattctttatgtacttattatccttgccgaaattatccggtgatttagccactcagattcagacgggtcgtcagttaaatgacacagtagcattagagaatccgctgcagccatcgcagctccaaacacaattggaaactgtgatggccgatttggcccaattcattacggattatcatctgaatgagcgttttaaacaagcttggacagtgatgaatgagcgtgttcaggaccatcgacaaaccttgagttatcgcttaacacaagcgattgaagaggactcgctaaaggcatttgccctcaaacaggcaaaacgttttaaatgtgagctgacagagactccctatcagttacagggatacacggatatggaattatcaacacaaatgctgatgtttgacgctttccaaaaagggctgcatgtggctgttttggatcgcgatgaacaatttattgagctgacctatcaacatcatcatgaattagtcaaaaatgggaatataacgagtttagatcagctaattagtgggccgttagtggataataaggtagtgactaaaattttattggcaagtcatggtatgcgggtgccagcgggtgccgaatataccgctttagagacggcagtagcagattatcaagcggcgtttggtcagcgcgcgattgtcattaaaccaaaacacagtaacatgggggcgggcattaccacatttttaacgcgtccaagtgaagcggacttcattgctgcttttaaactggcacaaacgtacgatcagcaaattttagttgaagaattcattgcgggttcggaataccgtttcttagtgatgaatcataaggtccaggctgttttagaacggattccagccaatgtcgtgggggatggtcgttcaacaatcgcccaacttgttgctaagaaaaacgacaacccattacgtggcgaagcgcacctgacaccgttgcaaaacattcgccttggtgaacgggaattgctcatgttgaaacaacaaggttaccgccctgaagatgtgccattgcgtggttcacaggtcttcttactacaaaattccaacgtctcaaatggtggtgattcggttgacgtgaccgatgagatggatcaaagttactttgcgattgctgaacaggttgctgaaattttgaacctcaatatcacgggaatcgatatcattgtgccaaacttataccaaccatatgatccggaacaccctgagatggcggttgtgctagaagcaaactacaatccagcgatgttgatgcacttgttcccaatgatgggtcaagcgcggcgcgtttcaatgactgtcttacaattacttttcccagaattagcgattgaaaccgactaaagtaatgcaaaaaggcccgcacaagttaaactgtgcgggcctttttagtgttaatcgaaaagatgttttaagaaaccaccttttttggtgggtgcatcttgcgttgtggtttttggatcagggtatagtgtatcgagcgtaattgcctcatggttaatcgcgtctttggcaaccactaacaaaccgaaggccgttggttcggttttggctgtttcgttgttaacgagcgtgaacggaatcccgtgtgctgaaagggccgctaaataatcggtagcagcggggttcttgccgtttaataagacggaatagggcttataatccgtaagatgcgcttcgaatttagcttgcgcagtggcgagttcctggttagtaatgcctaagaagacgcgttcacgtaatgagccgaggtagcggcggcgttcatcgggattggtttgtggtgcgccgtgcatggcactatccaagtgttgttgtaattgatcattatctgacaaaatagtcgcctcatttctgaattgtgctatattagaattaaacctaagtataccatgttggaggaaaaagatgtttacacgtgctgattttgatatttttgatgaccaaaccttaaagggccggttagacaagatttatacgcaacttgatccaaagtttgaagtatttggtgtgcaattgcaagcagaactcgtagtagaaacaaaacgcgaattctcgttgcatattgccaagcatttacgccgcttcaaaaatccaccaatgaatacttggatggcacttagtgagagctcacgcgggtataagatgataccgcactttgaagtcggtttttgggatgatcggatcttcgtttggtttgctttaatggctgagatgccagataagacggattacgcaccgttattggcaagccaaacagaaagcctcttaagggactttgtcgactatgatttaagctacgatcacatgaccaagcaaaaattcccaatgtcatcggagaacttgaaactgattcaagataagtttgctaagaccaaaaaaggggagtggctcctcggaaaagtttatctgaaagacaacccattattcgaccaacccgaagctctcatggccgatattcaaacgaccttgatgaagatggtgcctttatatgagttggtacagactaaatagattaaatcagacgcgtgtgctaagtaggcacgcgtctttaaatgcgcaaaaaaagagccagacctaagtctgactcttttaattgaacagataactgcttatctgttgtagaattcaacgattaaggcttcgtcgatttctggttctaattctgaacgttctggtaaacgaacaagtgaacctttcattgtgtcagcatcaaagctaacgaatgaagggcgaccaactgtgccttcgattgcatccttaacgattacaaggttcttagatttttcacggattgaaatttcttgaccaggttttacttcgtatgaaggaatatcaacacgtttgccatcgacagttacgtgaccatggtttactaattgacgagcttgtgcacgagtgcttgctaaacctaaacgataaacaatgttgtctaaacgttgttctagcaagatcatcaagttaacaccatgcttgccttcgcggattttaccagcgcgagcaaataagttccggaattggcgttctgttaaaccatacattaaacgaagtttttgtttttcgctcaattgcataccatattctgaaatcttaccgcgacggtcgttaccgtgttggcctggagcgtaagggcgacgagcaagttctttacctgtgcctgatagtgaaattcctaaacgacgtgaaagtttccactttggacctgtataacgtgacataaaaaaatcctccaataaatgttttggagtaaaataatccgatgtaaacttagtaatcgttcagttcacttattaacaatcttcacctttgcagccgcaaggttacacaattgaaccaaaactctgggcaaatgaactgttgacggctttaccgtttactgctgcattattttacacaatggctagtatagcgtacggtgtgcggcaacgtcaagcaaattcagattaaaattgcagcttttctaaagtttatcgctaattattgctgaaccgttatcttattcatgctataatcaaacatagtttaatgaattgaagtggatgaacggactaacaaatctgatttaaattgtaaaagggtgtgtctttgaatgttttacattctcattggaatcgtagtcgtcgcactgattggctacctaagtgttgttttttatcaacgttattttatcaaacaaattaaacaactagaagcacataaaggcgacttaatggcgttgccgattccggaacgcttaacgaagttacggtcgttacatttgacgggcgaaagtttgcaaaactttgatcgttgggaaaaacaatatgagcagattaccaaccataacttcagcacgattgaaggctatctttttgatgcggaaacggccaatgccaaataccaattcattcaggttgcacggattctcaaacaattgcgggcgtacttgactgaaacggatcaagatttactggatgttcaagatgctttagaaaatctacttgccaatgaagccgatacacgtcaaaaaattcagcgtctacgagaacaatatcaacaactacgtaaacgtttgttgactaagagtttttcgtttggacctgcattagatgcgcttgaagcaacgttaggtcgcttagaggtggattttgacgaagccaacgaactaacaacagccggcgaccatctaggggctaaggccattttgcagaaattaattactgaaacaacgcaattagaagaccagatggaacggattccaaagcgctataacgaattagctaacgagtttcccgaacaactggttgaaattaatgatacctaccatcaaatgttaaaagaacattatcaatttgatgatcggcagattgaagtcaaacaacaacaactaatggatcaacttgataagagcactaccttgttaagtgatttggccattgagtcggttgaagccaataacgatgaaattgcacgtggcattgatcaattatatgatcaattataagctgagatgactgccaagaaggcagtcgcgacgcaattgccaaccaccgcgacattcgtgcaacatgctgaacgtcagaaccatgagctattattggaactcgatcatctcaatcagagttatgcactcacacatggtgagttggcaagcgccaaacaattacaaaagcaaattggtgaagaacaggcgttagttgaagggcaccaagcgaagattgccaaccacgaagcggtttacacggcgattgctgaagatttgaccgggattgacgaacggctaactgtcatcgaagaaaaacaacaagcaattcatgatcaggttgctagtttgcatcaaggcgaagtcgtcgctaatgaaaacttacgccagtttgaacttgaactacgtaacttgaagcgcgctgttgaaaaggttaatttacctggtttacaacagaaatatttggatttcttcttcgttgtttctgatgagattcaaaaacttgatcatgatttgaatcaaattaagattaatttagacgatatcgcgaagcaattaattctcgttcaagaggatttagatgaattgaaggccaagacggataccttaattgacagtgcattgattacggagcaattgttacaatatgccaaccgatatcgtgcagattttcccgccatccaggaagcctgtgtgacggtccaaaccatttttaatgaagaatacgactatgctaaagctgtcgacttattggcaacggcccttgaaaaggttgatccaggtgcttacacacaagttgaaaaggcctattacgaccaaaagtcagacgcaactaattagtcacttagatgctcaccagtccgagacaagacgcattttgtctcggatttgttttgttaaagattaattggttgtctttaataaccaatttgctataatgtacaacgttaaaacactaatttttagtaagaaggatcgatatgatttattttgacaatagtgccaccactaaaatcgcgccaggcgcacttcagacctatcaagcggttagtgaacagttcttcggcaacccctctagtttacatgtgattggggaaaaagcctttcatattttagaacaatcacgccaacaaatcgctgatttattaggcgtagaccacgatgaaatcttctttaccagcggtggaacagaaggcgataactgggtcttaaaaggcacggcaattgaaaaacgggcgtttgggaaacatttaattacgacatcggttgaacatccagccatcattaaatccatgcagcaactggaaaaattaggctttgatgtgacttatctacccgttgatcagtttggtcgaattgatccggctgacttaaaagcagcattgcggcctgataccattttagtttcgatcatggccattaataacgaaatcggaacgtgtcagccacttgaagccattgctgatattttgaaggattatcctaatattcatttccacgttgatgccgttcaagggattggcaaaggcattcaagaggcgattttcaacgaacgcgttgattttgtgaccttatcagggcataaattccacggcccacgggggactgggattttgtataagaaacgcgggcgtcatttagcgccgcttttaaccggtgggggccaagagcatgatttacgttctggaaccgaaaatgtgccagccatcgcggcaatggccaaagccttacgtttgttattgaccgatgagactgaaaaagtacaccgccaagcagctattcgagaacgactctttaaccatatcagtcaatcggataaaacggttatgttttcacaactgacgcctgattttgcgccgcatattttgtgcttcgcaattaaaggtgttcgcggtgaaacaacggttcatgcgtttgaagaacacgaaatctatatttcaacgacaagtgcttgctcttcgaagaaagggactgaatctagtaccttaaaggcaatgcacgtcaatgaaaaaattgcgacaagcgccattcgggtatccctcgatgaatacaatacgctagaagaagcggatgcattcatcaaagcgttcgatcaaattaacgaacgcttcaaaaaaattaattcgtaaactaccatctaaaaggagataggcatgcaatacactgaaattatggttcgctacggcgaactttcgacaaagggtaaaaaccggaacgattttatcggtcggttaaacgggaacgtcacaaaggcgcttcacgagtataaacaactccggattcaccctaaacgtgaccggatgcatatcgttttaaacggcgacgatgcagaaggcgttatcgaacgtctccgtcacgtcttcggcatccaaaacttctcaccaagtatccaagttgatcgtgatttagattctgttaaagaaatggcgcttgccatgatgaaagaaatcggcaaacctgggatgtctttcaaagttaacacacgtcgttctgatcacaatttcttcttggatacgaatgatatgaaccgcgaattaggtggttacttatcagatgaattacctgaattagaagtgcaaatgaaaaaacctgacattactttgcgggttgaaattcgccaagatgcgatttacttaaccaaccaagtgattcaaggggctggtggcttaccagtcggttctgccggtaaaggaatgttgatgttatctggtgggattgattcaccagtagcaggttacttaacgctcaaacggggtgtcgacattgaaatggtgcatttctttagcccaccatacacaagcgacaatgccttgaataaggccaaagaattaacggcgaaattggtgccatacgttggtgggattaagtttatcgaagtcccattcacggaaattcaagaagaagtgaagcattctgtgccagaaggttacttaatgaccattcaacggcggatgatgttgcgtttaacggatcaaatccgtgctaagcgccaaggtttagccatttttaatggggaatctgtcggtcaagtggcctcacaaacacttgaaagtatgatggctatcaatgatgtcacaacaacgccaatcgtgcggccagttgcgacaatggataagaatgaaatcattgaaattgcgaaggatattgatacgtacgaattatcaatcatgccattcgaagattgctgtaccatttttgcaccaccagcaccgaagacccggcctaacttagataagacccggttctacgaacaacgcatcgatgtggatgccttgattgaacgctcacttgctggaattaaagtgacagaaatcaaagctggcgatcaattcttaaatcaagacgaagaaatcattgctgaactattgtaaactataaaaatcctgagaataacagtatgttgttctcaggatttttttggggagaagattcgggatttattttcagaatgaacgccggtgacgcttgacctttggcgttcactcagctaaactattaacaacgcgttgaacaagagcgattaagattgggctagtttagagagaagatgcatggctgagacgtcttccaatgaccaattaatcggtagcttgtgagctgttaacctgaaattaagtagggctaaccggacaatttcgttcgttaacaaatcatgagttggggactagtctagtcctaatttaggtggtaccgcgaaaaagcattcgtcctattgtgaggaatgcttttttgtttgccattaaacgcaatattttaaaggagtgaacaagatgactgatcacaaagaaatgtcaaccaaatatgatccaaatcaagttgaagccggtcgttatcaagattggttagacgctgatttattcaagccaaatgccaatccagatgccaaaccttattcaatcgttattccaccgccaaatgttacgggtaaactccatttaggccatgcctgggatacgaccttacaagatatgttaatccggcaaaaacggatgcaagggtatgatgtactctggttgccagggatggatcatgccgggattgcaactcaagctaaagtggaagcaaaattagctgaacaagggatttcacgttatgacttaggtcgtgaaaaattcatcgaacaagtctgggactggaaagatgaatatgccgcaaccatccacgcacaatgggctaagatgggcttatcacttgattattcacgtgaacggttcacattagacgatggcttatcagacgctgttcgtaaagtctttgttaccttatacaacaagggcttaatctatcgtggcgaatacatcatcaattgggatccaaaagcacggacggctttatcagatatcgaagtgttgcatcaagatgatgaaggggccttctatcatgttaactatccattgacggatggttctgggagcatcgaaattgccacaacacgtcctgaaacattacctggtgatactgctatcgctgtacatccagatgatgaacggtatgcggaccttgttggcaagacggtcacattaccattaatgaatcgtgaaattccgattatcgctgatcactatgtcgataaggatttcggtactggtgctttgaagattacaccagcacacgaccctaacgattttgaagtcggtaatcggcatgacttaccacggatcaatgtcatgaacgaagatgccagcatgaatgaaagtgccggcaagtataacggcatggatcgttttgaagcacgtaaagcgattgttgctgacttgaaggaacaaggttatttgattaaagtcgacccaatgacacatagtgttggtcattctgaacggaccggtgtacaagttgaagcccggctttcaacgcaatggtttgttaagatgaagccacttgctgaaatggctttgaagaaccaagcaaccgatcaaaaggtgaactttgtgccagaacgattcgaaaataccttcacacaatggatggaaaacgttcatgattgggttatttcgcgtcaattatggtgggggcaccaaatcccagcttggtaccataaacaaactggtgaaatgtatgtcggcgaagaagcaccaaaagatatcgaaaactggactcaagattctgatgtcctagacacatggttcagtagtgccttatggccattttcaacaatgggttggccaaacactgaagcgcctgacttcaaacgctacttcccaaccaatacgttggtaactggctacgatatcatcttcttctgggtctcacggatgattttccaaagtctcgaatttacagaacaacgcccattcgaacacgtcctcattcacggtttaatccgcgatgaacaaggccgtaagatgagtaaatcacttggtaatgggattgacccaatggaagtcattgaaaaatacggtgccgatgcattgcgttggttcttaacgagtggctcaacaccaggccaagatgttcgtttcagttacacgaagatggatgctgcctggaacttcatcaataagatttggaacgcaagtcgtttcgtcatcatgaaccttgaagacacaccagcgccaacgaagatgccagatgccgctaaccttgatttaacggacaaatggatcttaagccaattgaaccaaacggtggcagatgttacacggctttatgaaagcttcgaatttggtgaagcgggccggacattgtataactttatctggaacgatttctgtgactggtatattgaaatggcgaaggaagtcctttacggagacgaccaagcagccattgccaataaacgttataacttggcttatgttttagaccaaacattgcgtctattacacccagtgatgccatttgtcacggaagaaatctggcaaagtatgccacatactggcgattcaatcgtcaatgcggcttatccagaagtgcacgctgaattagacgatccagaagcaacaacgcaaatgaatgcgttaatcgatctaattagaagtgtccggaatatccgttccgaagccaatgcaccactaagcaagccaattgatgtcttggtcaacattcaagatgcgccattaatgacgatcttcaaacaaaaccaagacttcatcgaacgcttcgtacatcctaagtcacttgaaattgctgaaggtttaacagcaccagcattggcgaagacagccattatcagtggtgcagaagtttatgtgccattggctgaattgctcgacttagacgaagaaatcgcccgtttagaaggcgaattgaaacgtttagacggtgaaatcaaacgtgctaaaggcaagttgtcaaacaagggcttcacagaccgcgcaccagaaaaagtggtccaagaagaacgcgacaaacaagcagactacgaacaacaataccaatcagtcgaaaaacgagtagcagaattaaaaaatgcataagtgcatcatcaacggttagcttctgagcatttgcctaacttagcgaattggcgctgtaagcgccgatttgataagtgtagcaaagcacaggaagctgttgatgaaaacacgttaaaaaagaagtgcgactcgagctggttaggctttgaggattaacagtaaaatgggcattgtggcgttttttgccatgatgcccattttgcagttaaccggaaaaggctgctcgaggagcacgttagtgaaagaagtgtgattggttgcgggtagcaactgagcatcaatacaaaaattccgttaattcaggttttaggattaacggaatttttagattaagcggaagttgttgcaaccaaaagcacgttaaggccaccttaaaaactgaggtggtctttttgtgtgcgccagtttttaagcatcgattcgcgtgcaatctatgctaaaatagagacagtttgttaaaggagattggcgatgttagtgacagattacgaaacagctttggcgtatattcattcgcgccccagattacataaagaagcgaacctgaaccgaatgacgcaattgttggcaggtctcggtaatccgcaagaaaaccaacaattcattcatgtgactggcactaatggcaagggatccgttgtcaaaatggtcagttgtttgattgaagagttaggtttaaaagtcggtcgttacacatcgccgtttattatgcggttcaacgagcgaattgttatcaatcaggaaccaatcagtgatgccgatttagtaactgttacgcaacaaattcagacaacggttgcccagattcaaacaactgaccccgaatttgaagtgaccgaatttgaatggatcacagcaatgatgtttctatatttcaaacaacagcaggttgatgtcgccgttgtggaagtcggaattggcggtttgtatgactcgactaatgtgttgacgccgctgatatcagttattacgtcgattggtcttgatcatcaggctctattaggcaagacatttgcagaaattgcgactcaaaaagccgggatcattaaggctggtcatccagtcgtgattggtcaattaccaaaagaagcactgacggtggttgaggaaacggcaactcgtttgaatagttcgttagccattagtggctgtgatttttcgagtgctgcggtcaaaacgttacctacttgggggcaacagttaactttccaaaatgacgcggtaacgtatcgacaattacagattccgctgatgggggattatcaaattgaaaacgccgcggttgcattacaagtattttggtgttacttacagttgacgcaacaaaaactagaggttcgagacatcaaacgtgctttaaaacgggttaactggcctgggcgcttcgaaaaaatcaacgatgagccgttaattatcttggatggtgcacataatccggaaggggtggcgcaattggttcagacaacgcggcatcaatttaaaaatcgtgacatttacctgttattcggagcgcttggtgataaaaatctggatgagatgttaccacagctcaaaaaaatagcgacgcggatggtgctgactacggttcctgataatccacgcgcggcaacagcggcccaatatgcagcagttgatgagacgattacatttgaaccggactggccggttgcattaaccgaattattagcggatgtgtcggctgatgatgtattactcgtaacgggttcgctatatttaattagtacgattcgccaatattttaaaggagaatagtcaatgacaactagaggaattatttttgatatggacggtctattggttgattcggagaagatttattaccaagccaatattcgggccgctaaagaaatgggctttgattttacacctgaagatcaccatgccatcttagggaccactgatacgtatttacgcaattattttaaagcaaagcttggttcggcaacggccgcaacagaatttattgatcgttcataccgtaacgtagcaacggttgttgaagcagatggtgttgcaattaagccagggttagtcgatttactagattactgtgataatcaggggattagtcgggtgattgcatcgagcaatttccgcagcatggtcgatgactttatgcaaagtactggcctacaatcacggtttagtcaaattgttgcgggagacgaagtgactcacggcaaaccgaaccccgaaatctttttaaaagcgttggatagattagccttaccagcgcctagtgccctagtattagaagactcacctaatggtgtgatggccgctagtaaagctgccattccggtgattatggtccctgatttaattgcaccaactgcgataaccaatcagcaaacacttgcgaccgttggggatttggctcaagtgattccgtatttagaaaaataagcccgttaattaacgtattgttagttaaaccaagaagacgcgtcatgcgtctttttttgtgggaggcaaacaatggcggggaatacaggacaattacaaccaagagaacaattaatgcagtacggcgcagcaagtttatcgaacgagcaattggcaatcgtcattttgcgttctggtaatagtcacctatctgttggtgaggtggcgcgcaaattgctagcgcattatcctgactttcgggatttagaacaagcaagtttaacgcagttggaaacactggcaggaattggaccagtcaaagcgattgaaatccaagccatctgtgaattgagtcaccgattgcaaacgcaacgaactctccggtttggtgtggtcgcatcgagccaaatggttggccgtcgcatgattgaaacactagcgggcgaaacgcaagaacaactgctagctgtttttttagacgttaaaaatcaaattattcagatgaaacagatttatattggcacactcgatagttcagttgcgcatccgcgggaagtctttaaattagcggtccgttattctgcagcaaaatttattttggtgcataatcatccaagcggccagttgacgccgtcaacgcaagatattgccttcactaaacgaattgtcgcctgtggtgaactgatgggcattgtatgcctagaccacttgattattggaagccagcagtatctcagtttgcgagaagagggttacttagtggagtaaaagagaacgcttttttctttaagaatctgttaattttaggcgagacctgtcaaattttctgaaaatccgttaacatagtagttacattgcgttttttattacgtaaaattatgatataatgccaatgactataaaaacgtttggtaactgaaggagagaaaaatagtgttcggattagggactagaaatatcggtattgacttaggtaccgcaaacacactcgtatacatggacggtaaagacattgtcttgagagaaccctctgttgtcgctaaaaatacacaaactggtgacgtgattgctgttggctcagaagcccgcgacatgatcggccggacacctggtagtattgtggcaattcgcccaatgaaagatggcgtgatcgcagattacgatacaactgctgccatgcttaaatattttatcgaaaaatcattaggtcgctcatctagcaagccatttgtaatggtctgcgtaccaagtggtgtgactgaagttgaaaaacgtgctgtaatcgatgcaactaaggtggcaggcgctcgtgatgcatacgtcattgaagaaccatttgcagctgcaattggtgccggtcttcctgtgatggatccaactggtagcatggtcgttgatatcggtggcgggacaacagacgttgccacaatctcattaggtgggattgtttcaagccgttcaattcgaatggctggcgacaagttagatgacgcgatcatttcttacatccgtcaaaacaataacttgttgattggtgaaagaacagccgaacaaatcaaattccaaatcgcttcagcatcaccagaacgcgctaaggaaattgaagcgatgagcattcgtggtcgcgatttagtaactgggctacctaagacagtggacattcaagctgttgatattgctgaagccatcaaagaagttgtcacagccattatcgaagccatcaaagaaacacttgaagaaacatcaccagaaattgcagccgacgtgattgatcacgggattgtcttaactggtggcggcgcattgttgaaacacttaccagaagtgatttcagatgctactaaagtgccagtctttatcgctcaagatcctttagactgtgttgcagtcggaactggcgaatcattaaagaatatcgatgttatgaagaaaaattaatcgttcagtagaagtgggacaagaagcggtcagcgttgacgtagcgcctaaattagtgacagattcgggttgtgaatcgattgctataggaaggactactgatcaccggtttttgtcccacctttacgatattaaggatggatggtggcgaagaaaccatgcaaaaatttttttcaaataagaagttaattgtgttattaatcatgctaatcgtctgcatgggcttcatcgcaatgtcagttggtttacgcaataacaaaaagagtccgagtttcgtacgccaatttggcaacgacgtaacgggcatcactaaccaagtcattagcgtgccggccaatgggattggtcgaggggtagatgccttaacagacttgattaatacgtaccaggaaaacaaagaacttaaagcacaacttgatgatttagctcaaaccaaggttcaaacccaaaccctcaaagaagaaaatgcaagtttgaaaaaggaactcggcttaaaaggcaccttgacggattatacaaccgttaatgcgtctgttttatcccggaatcctgataattggcaaaatgcattggttatcaataaaggggccttagctggacttaaaaaagatatgcccgtcatgtctgagtctgggattattggacggattgttgaagtcaacaagactaattcgaaggttgaactcgtttcaagtacggatcaaagtagtaacggatttgctgctgtggtgaataccaaagatggtaagcaagttaatgggatcatgtccggttacaatgctgaccggaaacaattgaagctcgggcagattaagaccgatgcggcaatcgaaaaaggtgacaaagtgatcacgtctggtttaggtggattaacccctaaaggcttgtaccttggtaaggtagcagcagttaagaaagacgattttgggttagcattaactgtttatgtgaccccagctgctgatttaaacaatttaaccgttgtgactgtcatcaaacgaacgattgaaggtgagtagcatgggtgtgacgcgattacaacggcgctatttattaccaatctacttactcgttgcgttttatttggatggcgccatcagtcatttatgtgaacaatggttatatacaccagatcatacgttgattagccggctatttatgctcgtgttagtggtaacggcctttgttttaccagaggaacgccaacttacgtggtatgcagcagggattggtcttttatacgatttgtattatacggggatgatcgggatgtacacttttgcagtgccgctcattatctatacagtgcgttatttaaaacaatatttacctgactcagcctttttcattgggctaatcgatgtcttgtgtttaacattactcgagagtacgatttacatcatgaatcgcttgattggttatgcaacagtaacaccagtcgaatttattagtaatgttttagcaccgacaattgcattaaatttggtttattttgtctttttgtatttgcctttaaaatatttattgctaaaattaaaatcagaacggtaaggggtttgatttttctatggatgcagtcacgttacgaggacgtaaagaaggttttgaattaaacattgatgcgggtgcggatttcgatcaagcattagttgcactagcggaattattgaataagattcgcttagagcaaccgcagttggggagcgatcagattgaactggagctgaccactggtagacgcttgttgaatgatgcgcaaaagcaagcactggcgaccgtctttgagcagtttccagaatttaatgggacaagcattcaatcggaagtcatgacgattgaacaggctgagattgatcggcgggaaaatagtattcacgttgaacccaatgttttacgaagcggccaagaggtcaattatgttggcgatgtcttattcgtcggtaatttacaccaaggcgcaacgttaaaagcaacgggcagtatcttcgtacttggtgaagttgccgggattgtgcacgctggttttccagataatgcagaagcagttgttgcaggtgatttatcacacgcgttacaattgcggatagcagacgcagttgagattctcgatcacaagaagacgccatttacggcacagagtgtaagtttcatcaatgatttacatgttatcgactacggtgagttaacggatttgaaacagattaatccaaaattatatcgtaaaatgaaggagcaataaaaatgggaacagctttggttattacatccggtaaaggcggcgttggtaaaacaacatcaagcgccaatattgggacggcgcttgcgcttttagataagaaggtttgcttgttagatttagacattggtctgcgtaatttagatgttgtcttaggattgagcaaccgcattatttatgatatcgtggatgtcgcccaaggccgtgctaagttgcaccaagcactgattaaagataaacgttttgatgaaaaaatttacttattgccagccgctcaaaatgcggataaagaagcgttaacgcctgatgaagtcaccgccatcgtgaatgaattaaaagaagaattcgattttgtgattcttgattgtcctgctgggattgaatctggctttaaaaatgcgattgccggtgcagacggtgcaattgtggttgcaactcccgaaatttcttctgttagtgatgctgaccgcgttgtcggcttgctagaagaagaagaaatgcggattgcgccacgcttagtaattaaccggattcggcgtcatatgatgaatgaaggcgaaacgatggatgttgatgaaattaccaaacatctttcaatttcattgttaggcattatttttgatgatgatgcggttatcaagacgtccaatgccggcgaaccaattgtgatggatccgaaaaacccagcaagccaaggctatcggaatattgcccgtcgtttactaggcgaaacagttccattgatgactttgaaacaacacaaggttggtttctgggcccgtcttttcggtaagcaataaacattaaccattgacttttgacgcaatattgaatagaatgaataacaatacattaaacgttgaacggtccaaattaattcttgaggttcagagagctgatgcgtggtggaagtcggcccttgagattaatggcacaaccgtgagtttgatcatcgaataaagatgatccgttagcccgttatcgctgtagttttagaaactacataagtttaagctgcgtgagcagtttattaaactgaggtggcaccgcgataaattcgtcctcttggagaaatccaggggactttttttattggtctaaaactaactgagttgtttgttgtgaggcaaacaaaaatttgaggtggcaccgcgaaatttagccctctttgtgttttaaacgcaaagagggctttttattttggacaaatgagaggagtctgtcatgattgactatagtttatcgattttaccagcattattaagtggggcgcagatgacgttggctgtttttggcctaacgattattggcgcgattccacttggtttattattaagtttagggttattagctaagtttaaaccactgcattatcttttagatttatatgtgtggctgatgcgtgggacaccgttattattacaactaatttttttattttatggtttacccgtggtcggaattgtttttaaccggttcgatgctgctttaatcgcttttattttgaattatgctgcgtattttgccgaaattttccggggcggctttcaagccgttgataatggtcagatcgaagcagctgaggtcttaggcttaacttacccacaaacaatcgctaaaattatcgtgccccaaacggttaaaattgtcttaccgtctgtcggtaacgaagtgatcaacttgattaaagattcatcgttagtgtatgttatcggcattggggatttactgcgggctggcaatgtcgcaagtgcgcgtgatgtcaatctcttaccacttttgctagtcgggattatttatttattgttaacagccatttgtacatgggcattacggcgtttggaacgctattatcgttattatcgctaaggaggcggcaacatgtttcaattagaaaatatcaatcaatccttcaaaggtcggcaaattttgaacgacttaaatttatcagttgaatcagggagtattttagcgattgtcggtccaagtggtgctggcaaatcaactttattacggttaatgagtgggcttgatcaacccgatagcggacggtttattattgatggtaaaccttacgaacctagtaatcgggaacaaggggcgcgcattggcgttgtcttccaagattttcggttattcccacatctttctgtccttgagaatgtgacgctggcacccatcatggtcaaaaaacaacccgctaaaaaggctaaagcagatggcgcaaaattattacagcaactagggttaagtgctcaggcgacggcttatccgttccaactatcaggcggtcaacgtcaacgagtcgcaattgcccgcgcattggcgatgcaaccggagattctctgttatgacgaaccaaccagcgcacttgatccatcgttagtggcaagtgtcgcacaactcattttagatttgaaacagcagggaatgacacaaattgttgtcacccatgatattcaatttgccaaccagattgctgatcaaatctttgaattacaaccaaacggggttcaacaaaatgatgaagcttaaaaaaacagcattaatagcggctttattgatgagcatgattggtttagcagggtgcgcacaacgcaatcagcaggctgatcaatgggcaacgattcaaaaacgccaaaaaatagtcgtcgggattgatgatagttttgtgccaatgacttaccgtgagaagaatggtcaattaaccggttttgatgttgatttggcacgggcgatttttaaggggagtggcattcgggttgactttcagtcgattgattgggatatgaaagaaacggaattgaataatcaaacgattgatttaatttggagtggttattctaaaacggcgcaacgggcaaaacgggttgtgtttagtgacccgtatctgactaatcggcaaatgattgtgtcgctcaagaaacaccctgttaatcaaatggctgatttaaccaaccaaccattaggcgttcaaacgggctcatctgggatggaacaactagagcgttatcttaaacgattacagcaaagaattgccaaccatgcaccaatcctatatgatacttataacaatgcgtttatcgacttacaggccgatcggattaaggggctcttaattgatgaagtctacgcgcaatttgaaattaagtcacgccacaacggcagcgattttcaagccatcgacagtccttttgcagcagaacagtttgctgttgggatgcgtccgcaagatcaacaattacgtcaatttatcaaccgacgttatcgggtcttacaagcaaatggtacgctagccaaattaaaagcaaagtggtttaaagaataggatgaatgaagaatgacagcaatcattatctgggggatagcactgatttggattgcaaatacaatcggggctgttatcaccgtatttcgccaacaacgtgatattgcagcaacctgggcctggctcttggtattgattttcttaccaattatcggctttgttttgtatctatttttcggaaaaaaattaccggaagatcatatggtcgatttgaaaacacaagaacggctcggcattgatgccttggtgacctcccaaaaagcagcgttacgccaagcgcagaagcaacacacgttaccgccagaaacgcagagcttaatcaacctcttcttagtatcaaataccgcggttgtgacccaggaaaacaatgtaacaattttaacggatttgaaggcggcgtatcaacagttgttaacggatgtcaatcgggcgcaagatcatatccatcttgaatactatgctttttatgacaacgaacacgggcgtcaactggtcaatctattggcttacaaggcactgcggggggtaaaagtgcgtgtgatgtatgatgcatttgggtcgcaacatttatcccggcagttctttaagccattggaagcagccggcggccaagttgtcccgttttttagttctcggttccggttcgttaatctacgctttaactttcgtaaccaccggcaattggcagtaattgatggcaataccgcctaccttggcgattttaaccagaataatcatcacgttaatattcctgcacgagatacgcggattcggattaccggcgatggtgtgttatcgtttcaagctcgctttttcatggactggaatgcggctacgcgtcaggaaaaggtgtattacagtccacaatattttcctaactcagatgaacacgggcagactagcatgcaactggtatcaagtggacctgatcgagaactcgatgagattaagttaggctttttgaagatgattgctgccgctaaaaaacggctgtggattcagaccccatattttattccggatgattctgtattggcggcgttagtgttagccattaattctggggtgactgtgaagatcatgatggccaaacgtgcaaaacataaaatgattcatcatgcgagtttgtattacgctagacaaatcgtgaaggcgggcggtcagatttacttctctgaatcaaccggatttaaatcacgcgtaatgttagttgatgggcaactagcagcggttgggacggctaatttagatattcgcagttttagattgaattttgaaacgaccgcttttttatatgatgcacaactcgcaactgaacttgaacaatcttttacggctgatttaaaagaatgcttaccatttacgaaacgacggatacaagagcaaagcaatcaagaacgttggtcacagaacttagcgcgtttgtttgccccaattatgtaaaaaaagaaccgtcagatttaatctgacggttcttttttagttatttgaaatagtcggttaagccggtataaacggcatcagcgactttagcttggtaattagcactgctaatataactaaagtctttatcagaattgatgtagccgagttctaagagaacagcaggccgttgattatcgcgaaggacttgataattgccgtattcaatgccgcgattgttaagcggtaatgtcttagtctgattgttgatggccttcgcgaggctcatatccttactgcttgaatagtagtaggttgttgtcccggatgcttcattggcttcattgcttgaatcaaaatgaacgctgataaaggcatcagcctttaatttattggcaagagcaggtcgcggttcgagatcgacaaaactatcatttgaacgcgttagcacgacgttagcaccagccgcttttaattttttagcaatcgcatagacggtcgctaatgtgtagtctttttcatacttagacttagttgaaagtgcaccgacgtcggtgccaccatgaccagcatctaaaacaatggtggcttcagaaagggaagtagcgctagtcttaacaacttcattcttctcagaaggagtgacaacccaacttgcgacgtaaccggtattaccatcggcatctttaacttgataccaagtaccactcttattgatataagttagcttggtattggctgggtagctttgggtatattgatacgaaacatcaggaccagtgcgtagcttggtattatccagttgggtggtcactgatttaatcgcggagctacttgtatcagtatccgtagactcagattcagcggttgtcgttttttgaacagtcgccggagcttggtcggaaacttcgattaaatcactttgtacccaaccaactgctgagttgtatttaatctggctccaaccgttttgttggtataagactgtaatttcgtcaccttgatttaacttaccgagtagttgactatcggcactactgctttggcggacattggcaaaactgttggtgaccttagcgactcggtttgaagtggcactgacttcggtgttatcgactaaccagctagcaacccagccaatcttatcaccacttaagcgcacttggtaccaattattcttttgtgagataacattcattgtttcgcctttattggcttgactcatgacatcataagataatccagggccttggcgaacgtttacgacgttcgctttaatcgtaatttgttggtaagcagccagcgcgtgggtcacaaagagaccgacaaaaacgagtaatgctaatataataacggccggatagtgtttaaaccagctcaaaggtttctgcatttttttcaacacctttgttatgttttattaatttataaggttaattatagcaaaaaactcaactttctaaagagtttcagcgaaaaagttacaaaaaattcaagattgattgacttttttttgaaataacgttaatcttataacaataagaataagtgatgaccagtgataaagtaaaggctaagccccctacgacagagatgatttcacagctgcaagaaatcaatggcacgccgagactgcttttgaggtctgtgtggtcgcacaccgttggcaacaacgttatataattaagctaaaattaaggtggtaccgtgcatttaagcacccttgttcaacgacaggggtgtttttttatttggtatccatttggaggaatgatcatgggctatcaaaagccaaaaggaactgcggatattttacctggagattcaaaccagtggcaattagtggagaaaacggcacgcgacgtttttgcccgctatcaattcaacgaaattagaacaccattatttgaaagctatgatgtcttttcacggagttcaggcgatacatctgatattgtcagcaaagaaatgtatgatttcatggataaaggggatcggcatatcgcgctgcgtccagagggcacagctggagttgtacgggcgttcgtagaaaataaactttatgggccagaacatcaaaaaccttataaggtgtattacatgggaccaatgttccgttatgaacggccacaatcaggccggcaacgccagttccatcaaattggggtcgaagcatttggttctgagaatccagcggtcgatattgaagtcattagcatggcgatgcgtttattacgtgaatgccatattacggatttaaaactggccatcaataccttaggggatgcggaaagtcgcgcggcttatcatgaagcccttgtcagctatcttgaaccacattttgatgaattaagtgacgattctaaagttcgtctacacaagaacccattgcgcgtcttagatagtaaagatgctaaggaccaagaaattgtgaaggatgcacctgttattttggattacttaacaccagaagcaacggcgcactttgaaacggttaagcacttacttgaaacattgcacattccatatgaagtggatactgaaatggtgcgcggactcgattattacaatcacacaatttttgaaattatgacaaataataaggtgcttggtcgcggctacacaaccgtcttagccggtggccgttataatgggttagttgaacaacttggtggcccggacatgccaggggttggttttggcttaggcgttgaacgattattattattgatgaatgcgcaaaacgaagcgttggttccagaatctaaactcgatgtgtatgtcgttggaattggcgctgaaacaagtgcgacaactctccaaatcgttgaaaagattcgtgatacaggtttaaccgctgatcgagactatcttgatcgtaaaccaaaagcgcaatttaaaacagctaataagttaaacgcccaaatggtgattacaatcggtgaatcagaattagctgatcaaacagcacatgttaaagacatgattagtggtgttgaaattacggtaccacttgctgaagtctatgctgactttaaagcagtgcaacaacagttaaatcaaaattaacgcatataagatgcctcaaaagtaaatttgaggcatcttttttatttgatggcagtcaattcactttaatcctcaggaaatcccagactgtcagaacactctgagcatatttgtcgctatctgtttgtatctgcttataataataaacacgaaggagtgatggatatgacagatgatttagaacaacggttaacgacggaacaatatgcggtaacccaacaaaatgcgacggaggccccatttaccggcgagtatgatgattttgatgaacaaggcatctacgtggatgttgtcagtcatgaaccattatttagttcgttagataaatatgatgcaggctgtggttggccctcatttacaaagccaattgcgcctttgacggaacgccgggaccaatcttatgggatggaacgcgttgaagtccgtagtgaagaagctaattcgcatttagggcacgtttttaatgatggaccgcaagaagctggtggattacgctattgcatcaactcagcagctttaaaatttatttcagtcgagcaactcgaaaatgaaggttacggtcaatatctaagcttatttgaagagggggcacaataatggcaactgatacagcaatttttgccggtgggtgtttttggtgcatggttcatccgtttgatcagcaaccggggattatcaaggttgtttctggttataccggtgggcatgttcctaatccaacttatgaggaagtttgctcgcatacgacggggcacactgaagcagttgaaattacatttgatcccgcgattatttcttatgcggaattagttgaaatttattggcgccaaacagatccaaccgatgccatggggcagttccaagatcgtggcgatagttaccggccggtgattttcgttaactcgcctgagcaacgtgcaatcgcggaagcttccaaacaagcattaatcgatagtggtcgcttcaacgaaccgattgtcacgcaaattgaggccgccaaaccgttctatccagccgaagaatatcaccaagatttctataaaaaagaaccatttagagcagaattggtcgaggggacacgccgtgctttcattcgtgaaaattgggcgcattaattccaagaaatcctttagtattcacaaatggtatgctagaatgaaagacatcaaaagtgaataggtgtgatattcaagtggacgatttagctcggaaacatcaaaatatggcgaagatttcggcagccattttatacggaatttgtgtgtcgattgcattgaactttttctgggaagaaggtggcatttacgcctctgggattaccgggttcgcgcaattcattcatacagtgacgtcgaaatttatgccgtttctaccatttccattatcaacgtcattgatgttattcgtgttaaatgtgccattatttattcttgcgtggttcaaaattggccaccatttcaccatttatacgtttattgcagttgttttttcaagtgttatggtacagattatgccctttacacagctaaccactaatccgattatctgtgcgatttttggggcggtaattaacggttttgggaccgggatggccttgaaaaacgatatttccactggtggcttagatatcattgggattgtactgcgcaaaaaaaccggccgttcagtcggttcaatcaatatcatgtttaatgtggcgctcgtttttgccgctgggttcctctttggttgggaacatgcgctctatagtatcttgagtatttttgtcaacggcaaagtcatcgatatggtttatacgcgccaacaaaaactgcaagtgatgattattaccgataagcccaaagttgtgattcaaatgattcaagacgaaatgcggcgtgggattacgattgtccacgacgtagaaggggcatataaccgtgaagaaaagacgatgttatttaccgttatttctcgctttgaaatgcatgatttagaaatggtcatgaaacaagcggatgatcacgcattcgtcagcatgacggaagctgtcaaaattctcgggcatttctatgaacctaagattaaataagataacccgccattcaattgaatggcgggctttttttatgggttaggtttcgtcttgctttttgttgcgctttctgtgacaatctaggtaatcaaaatgcatggaggtagtggaatgttattagggagtcacgttagtatgaagggcaagcagatgttactagggtcagcggagagtgcagttgattttggtgcaaatgccttcatgatatataccggcgcgccacaaaatacgcgccgcaaaccaatcgaagaattaaatattgaagcagcaaaaccctatattgaagctcacaacttaggtccaattgttgttcatgcaccatacatcgttaatttagggaatacagtgaagcctgagaacttcaagtttgcggtctcttttttacaagaagaagtgttacgcgctgaagcattaggggccactcaaatcgtcttgcatccaggtgcacacgttggggcgggtgcagatgctggtattcaacaaattatcaaaggattaaacgaaattttacgacctgatcaaaccgcccaaattgccttagaaaccatggcaggtaaaggaaccgaagtcgggcggtcatttgaagaacttgcacagatgatcgatggcgtgacttacaatgaaaagttatcagtgacgtttgatacttgtcatacaaatgatgccggatataatgtgcgtgaagattttgacggcgttttgaatgaattcgatcacattatcggtttggaccgcttaaaagttgttcatttaaacgattctaagaacccacaaggcgcacacaaagatcgtcatgccaatattggttttggtgaaatcggatttgatgcgctaaaccatgtcttacagcatgaacaactcgttaatgtgcctaaaattctagaaaccccatatgttggcgaagataagaagcataactttgcgccatatgcgtatgaaattgcgatgctcaaagcggggcaattcgaccctgatttgttaacgaaggttgagcagaacgaaggcaaactatgaatttaaaacgaactaagtttggtatttttatcttaatagcggcgttttggaccttcatttttagccagccagtccaggctgccgatacctatgacatcagtcgttatcaggtaaacgttgatgtacaacctgatgggagtgctcaggtcgaacaaaaaacggtgtttgatatccaagatgatatccatggggtctatatcaaccagaatctccaaacaaacgttggtcaaccaaagaagttggttaacccgcaagtcgcagttaatggtcatccgtttagtcaaagtgaatcaggtactgaaggcacctatagcttaactgatgcacaacaaaattatcggttcaaactataccaaactgcacaagatggcaatcaattagcggttactttgaaatatcagttacaaaatctgattattaattatcgtgatacggcggaattgaattggaaagtgattggcgatgcgtgggatagtgacttacaaaacgttcaagtggtaatacaattacctaccacattcaaaaaagcagacctcaaatcatggacgcacggcaatttagatgggcaacaagtcgttgaacccgataaaggccgggtaacaattaaactcgctaataatccagcaaaccaatttgtcgaaagccatattatttttccaacggcggtgactgcggcgaatccgaatcagattgatcaatcacgtcgggaagccattatcaaacaagaagcgcgtttggcgcaacaagctaatcaagaacgcaaagcacaaaaacgccgttattggcttttatctataggagcagtggtcttagcgcccggcatgttcttgttaattttacgtaaaattcgaaaaacgcttcctgtgatgacttatactggacaggcaccagaacacgtctatgatttgccagatgaaaatgggcctgcggttgtgcgtcagttgttggcattaccaattacggagacagcaggggcggagagcttatccgcaacgattctagacttagttgctcgaaagaatctaacaattgatgttcaggaaccaaagaaggaactattccataaaaaaacgccgcaattttcattaacgctcgtcaatcgcaatcagttatcaaattcagaaaagaagttagttagctggctatttgatgtgattggtgatgggcagcatgtcagtctatttgagattgagaaatatccaaaacggcatagtgcaaaactgttcaatcaacattaccatgggtggcaaacagcagtggcgactgaagcaagtcgtagcgggtggttacgagaacacatcgctgagttaatgaccagtttgaattattggttaatcggccttggcgccctatttttaattttgatttttggtgctttgattggcttagttgcttggtggacgctcattccgatggggcttgtcttcattttaaccgtctggcgtagatttaatttgcaactatggacgcaattgggttacgaaaaacggggcgaatggcaaggctttaaacaaatgctaaaggatatttcgacactcgatatggcgaatgtcccagatgtactattgtgggatcgatatttgagttatgcaacggccttcgggattgctgataaggtcgttaaagctttgaagattcgattgacgccggaacaacttcaaacaatgcctctgggttattattattactacgggtatactgggggggtgaacatcggtcaatcctttacaacagctctcaatagtagtgttggcagtgcggtcagtgctgctaatccaacaagtgttagtggtggttctggcggcttttcaggcggctcatcaggcggtttcggtggcggttccggtggtgggactttctagtccaatcaaatgattaggtgaaacgccaacacactggtattatgagcgttattaaaatgtaattaacgcgctaaataagtgttagttggaggaggaaagcacatggagtttaacgatgtggttaatcaccgcaaggcaattcggtcatttgacccaaacaaaccgatctcggatgaattaatcgaaaaaataatggtgtccgcccaacgaacaccgtcgtggacgaattcacaactttggaaagtctatgtagcgacgggtgaaacgttagccgatcatttagaacgaacgggaaaccggatgaaaggctactctgatttaaacgtgattcaccggacagactggggaccgttaatggctgagaacagtcgcgtgtggaatgatgaaatcagtgcctatcttggcgaagacgggttagcgaattttagcgatttacaacgccatctgttcaacgcgcccgccgtgacttacttgacggttgagcgcaaagtttcgccatggatgatttatgacatgggggcttttagtcagtcgattctgttagccgcggctaacgaacaagttgatacaattcctgcctatgaaacggccaagtatccagatgcggtccgcaaagcaatgggtattccggaaaatgaactgttgattggtgggattgccatggggtaccgtagtgaagggatgattaatgcgtttcattcgcagcgtagttcggttgcgagttttttaacgattaaacattaacaaattaaaaaagcgttcaaatcgatttcagatttgaacgctttttttaattgacgtgatcgttcgcactgcccgcaaaatcgaggcccatgcgttcaagaataattgtggcagtttcttcgatcgaacggttggcaacattaatcacttggcaaccaatcttatcatacaggtcttgggcgaaagccaattcagctttaatttcgtccatgtctgaataagtggtatcaggatttaacccataagcaatcatccgttcccggcgaatgttattgaggacttctggtgtattcatcaggccgataattttcttaggatcaacccgccagatttcgtctggaatgtgcgcttgtggcacgattggtaagttggcaaccttgatattccgattggctaaaaagagcgacagcggcgtcttagacgttctagaaacaccgagcaacacgatatctgcttctaagaaaccgtgggggtctttaccatcatcgtacataacagcaaattccatcgctgaaatgcgatcaaaataacgatcgttcaaatgatgtagtgccccagcttcaccagttggcgtgctgttggttttagcagtaatcatttgtgtcattggtgacatcatgtcgaaactggcaatttttttcgcttggcaataggtttcggcgatttcagaaagaccgttagtggctaatgtatggaccacaattgtttcttcaggaaccgctttgcttaagacgtccatgagtttctcttgcgtgtgaacgaaggggaagcggacgagatcaggtttaacgtccggaaattgggcgagcgctgcttgtgctaattggagggcggtttggccgactgagtccgaaagcacaaaaacggttaatggtttagattctggcataaggcatgctcctttattcacttttatagcgctatcataccataattatcgaaaaaatcgctagatttgaaaaaatattcaattaattccctgtgggttattgaccgtattttcaacattcgctataatagcaaagaacggttcacgtgaagttaaatttttaacgaacgtaaacggttatacttagcacgcgaggggagggatatcatatgggcaagacagtcgttcgcagtaacgaatctctagatgatgctcttcgtcgcttcaagcgttccgtatcaaaagctggtacaatacaagaatatcgtaaacgtgaattttacgagaaaccaagtgtaaaacgtaagttgaaatcagaagctgcaagaaaacgtaagaagttctaatttcttagataaaggaaatgattgaatgagtttacttgaacaactaagttctgatttgaaaacggcgatgaaggccaaagataagttgcgattagctgttattcggagtttaaagaccgctttaactaacgccaaaattagtgcggggcaagacttatcttctgacgaagaattaagtgtactatcatcacaacttaagcaacgtaaggattcattagctgagtttgaaaagggcgatcgtgcagatctcgctgaacaaacaaaagcagaaattgaaatcgtacaagcttatttaccagagcagctagatgaagcagcagtggtcaccattgttgacgaagcaatgcaggctactggtgcgacaagtaaggctgactttggcaaggtgatgcaatatgtcatgcctaaggtcaaaggacgagctgatggcgctatggtcaatcaagtcgttaaatcaaaattaagttaattttaggcgggacttcctctggggagtcccgcttttttttatggtcgttaattcagattttgataattgaccataaattcgtgaattagcgcggctggctacttttaaaacggttgttgtttgtgatagaatgatggtagttttcattctaaaacaaatgaagttgaaacgtgcggttgcaacttgattcttcactttacgacgtgtagttaataatcgactaaagtcgtttatttgctgggctagataatactcagaatcagttgcagtcacactctggaaggagttatctttgttggctgaaacagatgagcgtttatttcaattggcaacgccaaatttagcggccgctttaatgggcacacacgatacttttttaaaaatcatcgaggaaagcttatctgtcgaactgattgcgtttgacgagcatattaccattcgcggcgaacaaccagcagttgaccaagccgcttctgttttagaaaacttagtggcgctgttacaacatggcattaagctcaatagtagtgatgtggtgagtgcgacgaagatggcccaaaaaggcacgattgctggtttccaagaactttacacggagccattaatcaaggatcgtaaagggcagcatattcgcgtgaagacattcggtcaacgtcaatacgtgaatgcgattcgtcaaaacgatgtcacgtttgggattggccccgccggaacggggaaaacattcttagccgttgtcatggccgttgcggcgttgaaacaaggattagtcgaacggatcattttaacgcgtcctgcggttgaagctggtgagagtttaggctttttaccaggtgatctaaaggaaaaggtggacccttatttacgaccgatttatgatgcattgtatgccgttttgggtaaagaacatactgaacgtttgttagagcgtggtgtcattgagattgcaccgcttgcgtatatgcgtggccgaacactagaagaagctttcgttattttggacgaagcccagaatacaacgcctgctcagatgaagatgttcttaacgcgacttgggtttaactcgaagatgattgtcaacggcgatattagccagattgacttacctaagaaaacaatgagcggcttggtgcaagctgaacatattttgcacgatattcctaagattgctttcgtacagttcagttcagaagatgtggtacggcacccagttgttgctaagattattaacgcctatgcggcgattgaaaagatgagaaagtaggaacacttgaatggatatccaaattatcgatgaaacaaaagtagttgcagaagcaaacgtaaaactggtcacggatattttagaatatgccgggcaacaattagatttacctgaagacacagaaatgtctgtcacgtttgtgacgaacgaacgcattcgccaaattaacaaggaataccgcgatactgaccgtgcgactgatgtcatcagttttgcaatcgaagaagatcctgaagaagaaggattaccagccaactttgaagaactattcgacattcccaagaatatcggtgatttgtttgtttcattagaaaaagcagctgaacaagctgaaacttatggacattcatttgaacgtgaattagggtacacaatggttcacggcttcttacacttaaatggttatgatcacattcatagtgaagatgaagcacaaatgattccattacaggagaagatcctcgatgaatttggattacaacggtaaaaaaccacaaacgggcaagaataaacatttttggcagtcactacgccacgcactcggtggattatggaccgcctttaaaactgaggctaatttacggcgtgatgcctggtttgcactcgttgcgattgctttcggtatttattgtcagttacattatttagattggttagcgattattttcgcgatttttatcgtttttatggctgaattttggaatacagttatggaacatctcgtggacttattagtcgatcaccagtaccatccagtggctaagcagattaaagatatcagtgcagccagtgtcttaatcagcacaattttagcgctattgattggcgccattgtctttggacacgccatatttaactaaaaaggggactattatgtcagaaacatatcgctcaggctttgtggccattgttggccgaccaaatgttggaaaatcaacttttatgaatcgaatgatcggtgaaaaaattgccatcatgtcatcaaaagcacaaacgactcgcaataaaattcaagggatctacacggatgacaacgcgcaaatcgtgttcgttgatacaccagggattcataaaccacataatgaattagatgaatacatggatcaagcagcgctatcgacgtttaacgaagttgatgccattttattcatgattagtgggattgataaaaaagggcctggggatcaatacatcatggaccaattgaagaacgtcaaaaaacccgtttatttggttgttaacaaaattgacgcgattcatccagacgatttattaccaatgattgaacaatatcggcatgaattagatttcaagggggtttacccaatctctgcattagaaggtaacaatgtccctgaaatgttaaaagaattggaacaaatactcccagaaggccctcaatactacccagaagatcaattaacggatcacccagaatatttcgttgttggtgaattgattcgggaaaaaattcttgaattaacgcatgaagaagtgccccattctgttgccgtggttgtggaacggatgaaagaccgcgtcaatggtaagctccagattgaagcgaatatcattgttgaacgtgatggtcaaaaacggattatcatcggtcaaaagggctccattatcaaagaaatcgggattcggtcacgtcgcgaaattgaagctttacttggcgaaaaagtcaacttgaagctctgggttaagattcaaaagaattggcgtgacaataaccaatacctccgtgaatttggttacaataaaaagagattgtaggcttaagcaatggcggaacatcgattcgaagactttaatggtctagtgatgtatcggaagaactataaagaaaaagatatgctggtcaagattttgaccgatcgctttggcaaaaagatgttttacttacgcggtgcgaataaaccgaagtttcgcttgagtgcggctattttgccatttacccaagctgagtacggtggcgacattcgcgatgatggcttatcctttttaaataatgtcaagtcggcgagtcagtttcaatcgattagcaatgacttgtttttaaatgcctatgcgacctatatcttaggcttagtcgatgttggttttccggatagcgaaccgctcggcagttggtatccgaagattgaacaggcactctcattaatcgatgaaggctttgacgcggcgatgattacgcacattatcgagattcagatgttacaagtcttcggggtgcagccacaactgcaagtctgtgcggtttgtgggcgttctgatttgccgtttgattattctgagagttatggcgggctgctttgtcaacgccactggcacttggatgttaatcgattccacggtagtcaacgggctatctattatctgcgtcttttttcagtgattgatttattcaagattcaatcggtcaacgtcaaacagacaacgcagatggagcttaagacgatgatcgaccggatttatcaagacacggttggcctatcgctcaagagtaagcaattcatcgataagatgtacagtttcgatagtcaattaccacaattaaaaaaagtgtcgtcagaaattgacagcacgccaaaagacgactaaaatagtaatcaacttaatagacgttgaagaaaagggtcccttaagacggtcagacagtgattctaggtgagtgagaactagaacaagacttgagtggattggcgtttcggagtcataccaatgaagcagcagctcgctttgagctgaagtagggtggaaccgcgagtaatcgtccctatgtgacttaacagtcgcataggctttttttatgcgcaaaatacggaaaagaggaattgaaatggttaaaaagttaaatgtgcaagaaatgattttaaccttacagcgtttttggtctgaaaaaggctgtatgctaatgcaatcttacgatacagaaaaaggggccggcacaatgagcccatacacgttcttacgggcaattggaccagaaccttggaacgccgcttacgtagaaccttcacggcgcccagcagatggtcggtatggcgaaaaccccaaccgtttattccaacatcaccaattccaagtggtcatgaaaccagccccattaaacatccaagaattttacttggatagtttacgggctctaggcatcgatcctttggaacatgacattcgcttcgtcgaagataactgggaaaacccatcaatgggttgtgccggtgttggttgggaagtttggttagacgggatggaagtgactcaatttacctacttccaacaagttggtggtttgcaatgcgatcctgtgacaagtgaaatcacatatggcgttgaacggcttgcttcatacattcaagatgtcgacaacgtgttcgaacttgaatggggcaatggcgtgttatatggcgatatttttaaagaacctgaatatgaacattcaaaatatgcttttgaagacagtaaccaagacatgcttttgaaattcttcgatgaatacgaaacagaagcaaaacgtttaattgacttaggccttgttcatccagcatatgactatgtcttgaaatgtagccacacattcaacctattggatgcccatggtgccgtttccgttacagaacgggccggttacttgtcacggattcgccggatggcgcactcaatcgcgcaagcattcgttgctgaacgtgagaaacgtggcttcccgctcttaaaacatgctcaagaatcaaacacggaggtcgttaacaatgactaaaccattcttattagaaattggcttggaagaaatgccagcccacgttgtgatgcctagcatccaacaactagaaaagcgcgtacgcgactttttagaagaacaacacttaacattcgggaccatcaaaacttacgcaacaccacgccggttagccgtcttgatcgaagacctagcggacaagcaagctgacattcacgaagaagcgaaaggccccgctaagaaaattgcgcttgatgctgaaggtaactggagtaaagcagcgcaaggttttgttcgcggccaaggtttaacgaccgacgacattacttttaaagcactaaaaggcgttgaatacgtctatgttgaaaaatcaatcatcggcaaacctgttgaaacaattttgccagaactaaaagccgtgattatggcgatgaccttcccaacgcggatgcactgggccgattacgacttcgaatatatccgtccaattcactggattgttgctttattagacgatgaaattatcgatttcagtattttaaacgttacgactggtcgcacaacacaagggcaccgtttcttaggtcaagccgtgatattggcaaaagcaactgattacgaagcaacgctggaagcacaattcgtaattgcggatgaagctaaacgccaaaacttaattcaaactcagattgaaacaatggcccaagaaaacgattggcaagtcgatttagacgcaaacttgttagaagaagtgacgaacttagttgaatggccaactgctttttatgggcaattcgatcctaagtatcttgaaattccagaagaagtgttgattacctcaatgaaggataaccaacgttacttctacgcacgcagccaagcgggtgatttattacctgttttcatcggtgttcgcaacgggaacaccgacttcatggaaaatgtcattgctgggaacgaaaaagtcctcacagcgcgtttggaagatgccgatttcttctaccatgaagatcaaaaggtaacgattgaacaaaacgttgcgaagttacaaaacgtgtcattccacgacaagattggtagtctggctgaaaagatgacccgtgttggtttaatcgcgcaattcttaggccaaaaatttggtttatcagaagcagaattagttgatttgcaacgggcaagtgatatttataaatttgacttagtgactggcatggtcggtgaatttgccgaattgcaaggggtcatgggtgaaaaatatgccttattacaaggtgaaacaccagccgttgccacagcgattcgcgaacactacatgccaattagtgctgaaggtgcactccctgcaacaaaggtcggcgcggttttagcaatcgctgataagttcgatagtatggctgatttctttgcagtgggcatgattccaagtggttcaaacgatccttatgcattgcgtcgtcaagcttatgggattatccgcatcttagaaaaccaaaactggcacttcccaatggccgattatcaagctgcgatgagtgacattgttaagcaacaagctgatttcaaccttgattggtcaaccaatgctgacgcgatcagcgatttcttaacggatcgtgttcgccaacgctttaacggcatgcggcctaaagtccggcgtgatatcgtagatgccgtcttgaagaatcaaagtcaagatccagtcgtgatgttcgaagctgccaaagtgctttcagaccatcaagatgatgcagatttcaaggcaacggttgaagccgtgacacgtgtgttacgactcgctgaaaaagttgactttgcaacaactgatttaacggttgatcctgcattattcgaaaataaagctgaaaaagcactttacacagcggtcgaagacttacgtggtacaattgctacgaacccattagctgataattacggcatcttacaaacactacgaccattaatcgaagcttactttgatgccacaatggtcatggctgaagatgaagctgttcgtcgaaatcgcttaacacagttgatgattatcgctcaaatcgcccttaccttaggtgatttaaacgaattgattgttaaataaacaattcaaaaggggataatagcatgttacaaatgaaacgggtttatgaagcagcgacagactcagatgggtaccgaattctagtcgatcggatttggccccgcggcatttcaaaagaacgtgccgctattgagacctgggcgaaagaaattaccccaacgactgacttacgcaagtggtttggtcatgagccagctaagtttcccgtttttaaagaaaagtaccttgctgaaattgcagctaatccagcttggccggcgtttgaaaaggtagtgcacgagcaccttgagctgggcaacgtcacgttagtctatgcggcaaaggacctgcaatataatcacgttgtcatcttaatgggacttttgaaaaaggaccttgacaacgaatgagatagtttgctatatttatttgcaactgtacctaaatggtgctatgatatatagtgtatttttgtgctgataatccttaaaagtcgcatttcattgtgaggtgcggcttttacagtcttagtacaatttgaattgaatagtgaggtgagaccaatggcgggaaagattccgaatgacgtgattgatgatgttcggagccaaactaacatagtggatgttgttggtcagtatgtccagctcaagaagagcggcaataacctatttgggatttgtccgtttcacgatgagaagaccccatcattctccgttagtgaagagaaacagatttttcattgtttctcttgcggacggggtgggaatgtcttcaagttcttgatggaactggaacagattagttttccagaagctgttacaaaaatcgctgactttgtcggcttcagtttagcggagacttatcgacccactcaaaatgttcaagaatcaagtgaagtgacgcagtttaagcaactctatcgtcaggccaatgaactctttacgcatattttaatgagtactgaagcgggccaaccagcgttagattacttacacgaacggggcttgacggatcaattaattgagacgtttagtattggctatttaccggatcaaaccgatttaatgctttcattcttccagaataaagaagttccgtaccagacactacgtcaatccggcttatttattgaaactcagaccggcaagctgcatgatcgtttttccggccgagtgatgtttccgattcggaatgcgcaaggtgaagtgattgctttttctggccgggttttggtgaaacaaccagatcaacccaaatatttgaacagtcctgaaaccgtgatttttaacaagcggaaggttttgttcaactatgatttagcaaagactgctattcaccaagaacgcaaagtttacctgtttgaagggtttatggatgtgattgcagcgtattcagccggtgtttcaaacggtgtcgcttcaatggggacgagtttaacgactgagcagttgggaattttagggcaacaggctcgggaattaattgtctgttatgatggtgatcgtcccggaatcgaagcgatgaaacgcgcaattaccatgttgcagcaaaataccaagcttgaattgagtgtggtggttttgcccagtggcgctgatccggatgaatatgttcgccaatatggtgctgaacaatttaagacaaccttgcaaaatggtgctgaaacaccgattgcatttgaactgcggtatttgaagcaagggttaaatctggataacgagaaggatcaacttgattacgtgcaacaggcattgtccgtcgttgcgccaattgattcgccgcttgaaatcgagatttacctcaagcaaattgaagccgatagcggcattacccttgatacgttgaagcggcagttacaaacattgcgcgttaaacgggcaacgcagcaaccacttgcaccggcatctagtcagtatgattatgacatgccacctgaaccggatgacgcatttgtgggtggaccaccgccaatcattggtgatccgcgggcaacagcgacgcgtcagccacaacggctaacccgggttgaacacgcggagcaagaagtgttgcatatgttgatggctaatgacgatatgcgcctgcaattggagaacaatgccgattttagttttgtgcataccccgtaccaactgatttacgagttatggcgcgcctttttagctgaaggtaagtcgaccttggccgacttcatgggttatatcccagatgacttacaagccttagtcgttcagattgatgcgcttgacttaccagaagaggcaagtcaagaggcgttaaacgactgtctgttcgtcattgcgcaaaataacgttgaggaacaattaagagaagcgaaaattgccttaaaagaggcgaccaaattggggaatgcgagcgaagaaacgcgcttaaccctggaggtcattagacttgtttcgcaaaagaaattaggaaattgatattaggaggtttctgaatggctgataataaaaaagctgacacgaagaaatttgatactgcggttaaggctttaattaaggaatacaaaccaaagaaagaaatcaccaatgatgaactcgttgcaaaaatcgtgaaaccatttgcgctacaagctgatgaaatcaatgaattaatgcaaaaagtggaagaccaagggattgggattgtcgatgaagatgggaatccaagtgccgctacccttaaaaaggaaaaggtttctgctaaagaattaaaagatatgactgcaccaaccgggattaagattaacgatcctgtgcggatgtacttaaaagaaattgggcgggtatctcttttaaacgcccaacaagaagttgacttagccttgagaatcgaacaaggtgatcaagaagccaagcaacgccttgccgaagctaacttgcgtttggtggtttcaatcgctaaacggtatgttggccgtggcatgcaattcttggatttaattcaagaagggaacatgggcttaatgaaggccgttgaaaaattcgatcaccgtaaagggttcaaattctcaacatatgccacatggtggattcgtcaagcgattacgcgtgcgattgccgatcaagcccggaccattcggattcctgtccacatggttgaaacgattaacaagttaatccggattcaacgacaattacttcaagatttgggccgcgaaccaacgcctgaagaaattggtgctgaaatggatatgaatacggataaggtgcgcgaaatcttgaagatcgctcaagaacctgtttcccttgaaaccccaattggtgaagaggacgattcacacttaggcgattttatcgaagatcaagatgcaaccagtcctgaagaacatgcttcttatgaattgttgaaagaacaattagaaagtgtcctagataccttaacagaccgtgaagaaaacgtcttacgtttacgtttcggccttgatgatggtcggacacggacattagaagaagtgggtaaggtgttcggcgttacgcgagaacggattcgtcaaatcgaagccaaagcattacggaaactccgccacccatcacgttcaaaacaattaaaagactttttagaataaaagagtgcgtaagcaggcggctatattttgagggttagcatagtcaggcgaataaccaacgatgttggttgtttgactgacgtagctagccgcagaaatatgcctgctagagcacgttttcgataaagtgcgtttagttacgggagcaactgagcattaatacaatattgtcattaattcagattttagaattaatggcaatgttagattaagcggaagttgttgaactaaaaaggggtctttgtcaactggtgttggtggcgaaatattagaggtatttgtcgaaaggcagatgcctcttttcttattattctttagccagtgagttggccgaacggccagtctggcttaagctaacaatcgattctttaaattcatttgaatatttaattgccataataaaaagctcctttatgatgtattatatcgaacagtttgtccgtaattccatcataggagccgaacatgcattttaatagtaagaaaacaagtatgactcaagatattatcgaaaatgccattaagccggataaacgttattggaatgggaaagtacctacgttacaagttgaatttcataaggaaatttcataccaattaacgcttcaaaaacatctattagagatcttatggttatctaaaaagtatcctaattcaggtagtataaaaagagcattgacggatttttataaaagactagattcaatagaaaaaattgaacatgatacattgccattaatcagtatactaactgatatagtaagcaataacccgaatacaattccaataggaattgcagtaatgagtcgagttctttcaaagggagaattaattaatattgatggagaaatagaggagattgtccagcggatatcaaggaaacttgaggggacaccagacatgaatttcctacaaatttggctgcagagactttcattaacttcaaatagtgaagttaaatatcaagaaaaaatatgtaaaactgtgatggattcagaatattctatttggaattccagttgggtgaagggtgattataaacttccatcaatagtgagagaagataaattggatctattaatgattgaggtaccaaatgaagtatttaatgtatttagtgagtattcagaataaatgaactatttaagggagtaattatgtatattaaatctattaaactaactaattttaagtccttcatgggggaacatataattcattttaaaccaggtgttaattatttggttggtaataataatgcagggaaaactacaatatttgatgcatttagttttatgatatctactgtgaaaaaaagtgattatatctctaaaagatatgaaagtgaatctgtatcggttgaaatttgcttagcaaatgttggtgaacttaagggcagcctagctaaatatgaagattataggacatctaaaaatgaattaatattattgaaaacttctaaagaaactaacattaagcaaggtaataaaaaagttaatatgaatataaaaacggttagactatggaatgagcaaactaaggaggatgtcccagcgcagtttgaaaaccctgtgggtgtagctaatgttgcgacggccttatttaatccacaatttatatatgcagatttacataatgaagatttacaagattttggaactacaaaaattacgggtaagttaattagctctctaacaaatgattttattgaaagtcaggagtttaaagcgttaaaggatgctcataatgctgcttttgggaaagatggtgtaaataagtatttgggtagtacggaagaggaattaggaaatagattatctgaacagtttggttcttcaaaagttcattttaaatttaattttcccgctgctactgatttatttaaaaaaggaactattgatatcgaggaaaatggattgaggacggatgcgtctaataaaggaaatggaatgcagcgagcattagctttggccattattcaattagtcgcggaacgcacaagcaaaaggcaagctacttttactaggaatgcagtttttgatagatgaacctgaaatatacctgcatcctaaagcacaagataagctcatggattcattaagaaaattaacaccaaataaccaggtattcattacaactcattccccatatatacttaggcattttagaaatgaaatagataatgtggatattataaagaatgatctctctaaaaaggtcagtacaatggaacaattatattttaaaaacccctcaatgagtgaggtaacgtataaagcatttggtgtgccgacacaagatctgcatcaacatttatttactacactacaacttaaatggatagaaaatacggatggaaagcatacgttaaacgccttcgataagtatttaaactcatattatggggtgccttgtgatgtggcatttgtgcctcgtataaatggagaatggaaacagaaagaatttaggacattaccatatgttgttagaaatgagatagaccatcctgaggtgttagaagataaaatgaatgatctttctgatgagaatttaaaagaatctattgattgcctgtttaatattttaaaatgtgatttattgaaggataatgaagagtctgcttaaatttacgggggtgttctacatgaaagatatctatgtcgttggtgctgcaatcatcaaagataaccaaattctatgtaccaaacgggccactgatcggattcttggagatttatgggaatttccgggtgggaagatcgaactggatgaggcgccggaagctgctttggtgcgggaactaaaagaagagttgggtgctgatattttggttgggccagcagttgtaactgatgtgcaccaatacgattttggcaacgttcatttaacggtttattatgcgcagttcacaaaggaaagttttggactagtggcgcatagccagatgaaatggtgtcgtcaatctgaattggaccaattaacctgggcaccggcagatgtggcagctatgcaagccattcaaaaacaagatttgagtcaattaacgttcaagtagggagcagttatgacggatttacagactgaattacaaaattcagctttagcgggattggttgataaagagcgctacatttctcaggacgaatacctgccgaagttattatttaacacgtcagaagatcatgttaagacgcatttggatgaagaactgatgacttgtcagcgcttcacttttgccgtggctttcattactgaagcggtcttaacgatgttgaaaccgaaattagcggaccttgccttaaaaggtgtcacgggccggattttgacgtctaattatttaggctttaataatcccaaggtgtttaaagaactgttgaaaatcccgaatcttgaagtacggattttaaaacaatctgattcattccatgctaaagggtacatctttgacaagggtgaataccaatcgatgattattgggagctcgaacttaactgaaacggcgttgattcgtaattatgagtggaacttaaggatcacttcgtatgaaaatgcggcgttaactgaccaggttatcaatgaggtcgaacagcaatggcaacgtgcagcagcattaacaccggagtggattacagattatgaagctgattatcaaacgattgtttttaatcggcagaaaaatgaaccgattgaaactgtcgctgaagagtccgcggattacactgtgattacgcctaatcatatgcaaaaggatgcattgaagtcgttgaatttcctacgacatgaaggtcatcaaaaagcattaattgtttcggcaactgggactgggaagacttatttgggtgcgtttgatgtccaacgtgtgaatccgaagaagttcttatttattgtgcatcgtgaacaaattttgaagaaggccaaagccagtttccatcaagtactaggtggcgattggtcggaatacgggatcttgtctggtaatgaaaaccagcgggatgcgcgatatttatttgcgacgattcagacgttagctaaggaaaatacattgtcgcagtttgaccctgaagaattcgactatatcatgattgatgaagcgcacaagtcaggtgctagcagttataatcgggtgattgattattttaagccacaatttttactagggatgacagcgaccccagaacggaccgatgattttaatatttatgagttattcgattacaatctggcctatgaaattcggctacaagacgctttggaagaaaacatgttagcaccatttcattatattggtgtgacagactacgaattaaacggtgaaattggtgaggagaagacgccattacagaacttggtttcctctgaacgaatggattatgtcgaacaacagttaaactactatggttattcaggtgatcaggttcatgggttaattttctgtagtcgtaaagttgaagccaaagaagtggcgcggattatgacggccaaaggctatccttcaattgctttgactggtgaagacaatgttgattatcgagaacaagtcattcgggattttgaagctggtgattatcaatacattgtgacggttgatatttttaacgaagggatcgatattccttgtatcaatcaagtcgtgatgctgcggaatacgcaatccagcattatctttattcagcaactgggtcgaggtttacggaagtttccgcgtaaagattttgtgacagtgattgattttatcgggaactacaagaataattatttgattccaattgctttaacgggggaccattcacgaaataaaaatagtctccgcagtaagttgagtacggatcaaattattgggatgtcgacgattaattttacagaagttgccaaacaacgagtttacgattcgattaataatagcaatttaactgaattgaagcagttacgcgatgactatcaagatttgaagaaacgtcttggtagaataccgctgttgtttgattttacaacacacggttcgattgatggctcagttttgattgctaaatatgacaactattatcagttcttgttgaagatgaaagaggacgtccatctatctattgacgaagatacggttttaagaatgttatctaaagaactattgaatgggatgcgaattcacgagctattattattgaagttgttgtttgaaaaagatggtgtggtatcagttggtgacttcaaaaaggccctcgagcaagtaaatgctagagtggatcagaagacattggattcgatgctattaatcctgagtttgagtttttttaaagcggctgatcaagataagtatgggcgagatgcctatgtaacattggacaataatcaatatcgactaaacgggcggattaaaacagcttatcaaacaaattcgtttttcaaattacttgtggatgatgttttggcgacaggtctattcaaggcagatggttacgatcaaacagtgccattaacgattggtaagaaatatacccgtaaggatgcttgtcgtttattaggttgggaaaaagaccagacgtcaacaatttatggctacaaaacggcttatggaacttgtccgctgtttattacttacgcgaaatcgcaagatatcgatgacggcatcaaatatgaagatgagtttttgaatagtcagacgatgcgtatgttcacgcgtcatccccggaaaatagagtcaccagaggtccaaacaatggttcaagggaatgcgtctggtgaattgaaaatgccactatttgtgaagaaaagtgatgatgaagggattgatttctactatttagggcttgttgatattgatcagaaatcattacgtcaagaatcaatggttgttaaagatggtaaaattgatccagtcgtaacaatgaatttaattcttgaaaaaccagtgcaatatagtttgtatttgaatttgacgaaggattaagaagaaaccacaatttagaattaagttgtggtttctttttgcattcatagtctaattagactatactataaaaatcagttcaggaggatttttatgatgaagtcaattttattagtcggtcagtcgaatatggctgggcggggatttattcaagatgtgccgggattgcggcacgagcgcgtgaagatgctgcgcaatgggcgctggcaaatgatggccgaaccgattcattttgatcgggaggttgcgggtgttgggccggctgcgtcatttgctgcggcgtgggtgcaagctcatcctgatgaagaattggggttaatcccctgcgcggaaggtgggagcaccatcgatgagtgggcgagcgacgaacttttgatgcgtcacgcgattactgaggcgaaatttgcacaggaatctagtgagttaatcggtgtgttatggcatcaaggtgaaagtgacagtttaaatggtggctatcaaacgtatgcggccaagttgacggcggtcttcaatcatttacgtgcagcattgggccaacctgatttaccaatcattgcgggtcaattgccagcctttttaggcaaagcagggttcggcgcgagcgccacggaatttaacgagattaatcgcgaaatggcgcaagttgtcgcgcaagatccgcacagttatttggtcaacgctgccgaattaacggctaacccagatgggattcacattgacgcggcctcgcaacggcgttttggtattcgttatttccaagctttcgaacagcatcaagatgttcctgacgtccttgcagatgaagcggttcaactagaccaactctatcaacgcccagaatcacagcaggaaaagatgtaccgattgagtcgtgattttgcatttggtcaaatgagttatgccgactttattgcacagctaacgggcaaggagactagtaaatgattcaatttttaattctgggattactaaagaaaaagccgggcgcgtatggttacgaattattgactgacatggaaagccaatactacgcttttttcgtgaacttcacgaagggctcgttttactataacttgcagcagctggcagaaaaggcactgatcgaaaaagtcgcggacgacgtgcccgataagcgggaaaagaatcgctatcaattaacggccgctggcataacggcttttgagcaacaatttgcccattatggtcgccagaataagccgattacgtttccgttctacacaccactattattcacggatcaagtgacaccggaacagatggataagctgttaaaaagccaaatcgaacagacacaggctaaaatccgtgcgattgacgcggcactagccaatccggctgacttgcaaccgatgtttatcaagatgatgactaattctaaacggcatcatgaagttaatctggaatggttgcaagaacaacttgaaaatcaataacgcaaaaaccaccgtactgtttagcagtacggtggtttttaattcagtcgtttatgaaaagaattcgtataaatatacgctaatacgttcttcagtaataaggatcaatcgtctggttcgaaattatttctgaataagaagaattgtccgtttaaagactcgtcatgttcgtagtgatcagagatgatgaggtctgcgtcttcgatctaatcagtgaacacaattgaagacctgaacacattttgtagatttttggtaatcatcgtcgctgcatagaaatttttagtgtattggatattaatgtttaagggtttgatttggggattgtagtcgagcaaaaagaagaacatttcgcttaatagagtgcccgttgaattcgctggtaatgttgtgtaatgagccttcttttcagctaaaaattgatttaaatgatcaatttcttgataagaatcaatatcgatttgtttgaacgttgaggccgtgtcattaaacatcacaaggctcctatgatggaattacggacaaactgttcgatataatacatcataaaggagctttttattatggcaattaaatattcaaatgaatttaaagaatcgattgttagcttaagtcagactggccgttcggccaactcactggctaaagaatacaacgtcagtgtttcaacggtcactaagtggattaaacaagctgatcctaacaacactaaagtgttatcatcaaatgaacgtgctctgattaaagaaaataaacggttaaaagaagaaacaataggggctttagaagtgtatagcaatacgataaaggtaccaacgcagaaacatgctaaatttgtaacggtgtatgtggaattttaaaaaagacatctagcctattagacttttatggctaataggttagatgtcttttggttagaggttgttaccagtagtaaattaaatgattatggaaaataaaggttagtaataaaaggttgtatctaataggctgttagtaaaatgttttacgtgaaacattctaagccattgttccacagaaatcccgaaaagttagcctaaactaaaatatttgttaattccattaaaatcatgtatgctgtagtgagaaaagttaggtttacctaaaagaacggaggctctttatgttatcagttaagaacctcaccgttgcttacgatgacacaccagtatttactgatgttgccgttcagtttgacgcaggcaaaatcactggcatcattggaccaaacggtgcaggcaaatcaactctgattaaagcaatattagggttggttaaggcacggcaaggctcagttttatatcaagatcgaccaatgcgcgcagttcagaagcaggtcgcatacgttgaacagcgtaaagatttggatttaaattttccaattaacgtttttgacgtggtgctaacgggcacgtatggcaagttaggcttattccgcgatccgggtaaaaaggcaaaacaagccagtcgcgcggcacttgaacaagtatcgctcagcgaatttgcgcaacgccaaattggccagttgtcaggtggacaattacagcgagttttcgttgcacgcgccatcgtccaagaagcggatattattattttagatgaaccgtttgttgggattgatttacagagtgagaccgcgatcatggcaatcatgaaacagtggcgtgatgcgggtaaaacaatcattgtcattcatcacgatttgaataaagtatcgcaatatttcgatgatttagtggtgatgaaccacggcatcgtcgattatggaccaactgaaaaagtttataatgcgcaaaacattgagcgtgcttttagtgcggacttatccgctgtcttgtttgatgcacaggaggtggcaaaatgacgagtattccagcttttattagtgcgttgggtcgttatgaattcttgcagagtgcgttgctgaccgccgtaatggtcggcatcatgtctggcattgtcgggagtttcatcattttgcgcgggatgtcgttgatgggtgacgcgatttcacatgcggtgttaccgggtgtcgcagtggcgtacatgttgggaattaatgtgctggttggcgcatctgtatttggtattttagcggcggtcttaatcggctttgtcgcaacacatagtaaaattaagacggatacttcgattggggtcgtctttagtgccttttatgcgcttgggtttatcctgatttcgatggccgaaagtgcaaccaacttacatcatattttattcgggaacattctcgccgtcagtgatagcgacattatgagtacggcgattgtcttaggcttagtgatcttattcgtctcattcttctacaaagaattattgattacctcgtttgatgaaacctatgcgaaaacatatgggttaaaaacgcaggtgctacattacggtttaatgttggtgctaaccttagtcacggtttcagccctacaaacggtcgggattattttggtcgttgcgatgttgattaccccagcagccaccgcctttttatggacggatcgcttagtgacgatgctcttcttatcggctgggattggtgctgtgtcagcaatcagtggattgtacttcagttacacattgaactgggcatctggtccggcgattgttctgatggcagccgtgctctttgccatttcattcatctgcgcgcctaagcaaggtttccttaagtggcgcaaaggaggacgaccagcatgaaaaaaatgattgtgacgttaattgcagtttttggtttggtgggtggtgtgtatggtttcatccagcaccgcgcccaatctaaacaacaacaaacgaaccagcagactaaattacgtgtagtgaccacgaattcgattcttgaagatatggtccataatgttggtcaagaccacattgaactttacagtattgtgaaacggggaactgacccgcatgaatatgaaccgcaaccgacggatatttcaaaagcgactgatgcggatgtgatttttcataacgggttaaatctcgaaacgggtggcaatggttggtttagaaaacttgttaagatcgcgcataagcaattcgaaaaggatgttttcgctgctagcaaaggaattcaggtgcaacatttgacaactaaccaaacagaacccgatccacacgcatggttggatttggcgaacggtattcaatacgttgaaaacattacgaaagcgctgcagaccaaagatccagcgcacgctgatgattaccgcaaaaatgcggatcgctacactgcacgtttgcgcaaattgcatactgatgcgcaaactaaattcgccgatattccagctaatcagcgggtcttggtgacttcagaaggcgcctttaagtattttggtaaggcctatcaggtcacaccggtttacatttgggaaattaatactgagtcgcaaggcacacctgaacagatgaagacggttcttgcaaaaattgcagattcagatgttaagcatctgtttgttgagagttctgtttcgccgaaatcaatggaaaaagttgctcaggaaactgggttaccaatttatgcgaaaacttttacagactcactcgcgcaaagagggaagcaaggtgacacttactatacgatgatgaagtggaacctagataagattcatgatggcttagtcggtcaataaaaagataatttttagcaattaaaaaagcgggtgcttagacaaaaataaatttgtctaagcacccgctttttttgtagttatccttgttgagaaagggaacggcgattggcgaagggaacgagccgctttttttgttttaagaaccgttgccggtagtaacgatattgtggtgtgaatggatgggaagatgaggcatgccatggcttttcgtgaccacagaagtgaacaagcgcaggttctttttgggtttctaagaattgttttttgaggtgttcagttggtggtgtgatggtgttcatcaaaatgtttgtttgggcattccacatagggtgaaggtgaatccaccgatcatgcaaaattgcatttaaagcatcttgatcgtggaagcgtaatttctcagggtgctgattgatgaagtcgagtacacggctgacaatattgtgttgacgccattttttgagattgagtaacatcacaccggagttaaagtaacgcggactttggtaatcgatagccattttttctaagcgttcgtggaacccagcatcttctactgcagcgaggaaggattggcctaagtcgatatcccatagccgggctaaatctgtgaggcatagcgcatcgcaatcgatgtagagtgcacgatcgaggtgagggaacacgtcgggaattagaatccgatagtacgccgttttcaagatccgatcactttcaacagtattggccagtaaagattcgttgacctctgcaaaggtcaagtcggcatcaaatcgagccacaacatgctgtaagactgctttatctcgtgcggtgaggtggtcttctaagacgtaaaaagcatagtgtcgatgtgagtcattgtgattaagaattgaggcgtatagaattgccagcgtttcgatgaaatcggaattgacagccgatacaatgttgattatatcggattgttgcgcatgtaattgtttgagttccttttgatattggtttaagaaggggtgactttttagagtgttccaaggtttctcgtgtgttgtgaagtgaacaattgccgggttggcgattgcttcatcaaataaatgggcatattcagtgttgataggcgcatgttttctaaagagcaatgagttttgtacgttccatttaggatggagtagtttcactttaccaaccaaagtggcatttagcgcatcttgatcatggaattgtaagcgatccgcatgatgattgatgaagtggaaagtccgctctgtgatggatgcatgattccaccgaaccgtatcaattagcatgacccctgaattgaagtagatgttattcgattgtggtggggtgatgccgagccgtcgcagtgtgagtgcttgtccaggatcaatcacggcacccacgatatttgtgcccaaaggcgtattgtatagcggcgtgagatcagtttgtacgaggatatcgacatctaaatataagacacgttcgattttttttcgcaacaaaagagttggcgctaaaatgcggtagtaagccgttttgttgatatggttgctttcaggacagttttcaaaaagctgcttattaagtgcaataaactcaacttgattggggcgtggaacgcgcttggaaacagcgtgtttcgtttgcggagtgagttcattatcgagaataaaaaaattaatagtagttttgggcgaaatatgggttagagccgactttacggcgattaaaagttgatcaccatagttttcatctgcggcaaacatgatattaatagcgttgataataaccatctccttttaggtgttgtgtctttatttaaacaacttcaacaatctttgtaaagttaaatgattatgctaacaataacaaaacgtaatcataaaagttgcatcaataaatgtgattgttttatattgatggtgtagcgttattaaagatttcatgaaaggaaggttgcttatgcaaaaacaagtccgaattaggaaagttaggttaggtcgtagtacagtcaagaccccagaattgtgcttggtgattaagaaagaatcagccaatctaaagtgttttctagaaggtatgactgatttggaggaagcaattttaagagagaataacggtgaggccctcgtcggtgagagctgggggccattggaatttgatcatcgtggtcgtgtttttagtaacaagacggtaaaaatgtgtcttcaaaaattggatgataatcgatgatcctagcagccaaagtggttgattagagaggatgagtcgatggtttcgcgcatattaccaattaaaaatggctacaatttcagagaactaggtggctatcaaacactggatggtcgctcgattaaaccgcatcgattattcagaacggggaatctggcgaatcttagtaagagagaattggtgctcttggaaagctaccatatcacctatgtcgtggattttcgttcaccaatggagcgcaaaaaagcgccagataaaaagattacgacggcatcttacgaatcgttgccaatttttaaagaagatgcgacgcaaagtacggcgagtgaagcggaactttatgagcgctacaccaataatccgcttggtgggcagcaacaaatgcgccaagtctatcgagaaatggtgcaagatccctattcaatcggaatgtatcgccaattcttcgaacgattattgactgaagccgatccgcaacaagcagttttatttcactgtacaggtggcaaagaccgcaccggaatggcggcttattatttattaaatgcactcggggtacctgaagatgtgatccaatatgattatctattatcgaatacagcatctagggaacacgttgcagcccgcattaaggagctacgtcaaaaagatgcctcaagcggctttttaaaaagtatgcatgcattgatgagtgttgatcagtcctacttaaacgcagctgagcgcataatcaatgaggattatggttcaactcaagcctatttacaacaggccttaggattaacaacgcaggacattgaacatttaaaagcagtgtatctagattaattggaaaagagggaacaagaagatgggtaaaccagatttaaaagatccgcgaacactttgtcggacagagccatttcaagaacaagaacaagctagtccggcattgcaagatcaaatgcatcccaagccagattgtggcgaagaacactaccgtggtgcacaacggttactagatcgtaaagtgctgattaccggaggagattctggtatcggtcgcgcagttgcaattgcgtttgcccgagaaggagcagacattgcattgcaatatttgccaggtgaagaagtggatgcacaagaagtggctcaattggtgcgagatgcagggcgtaaaatcgcattgatcccagctgattttcggaaaccacagattgctagccaagtagtggaaaccgcgcagcagcaaattggcacacttgacacattagtcttaaacgcagctcaacaaattgcgcatccatcaattaccgaattaccaatagaacaagttcaagatagttttaacgttaatgtggttgcgatgtatgcgcttgtgcaagcagcattgcctcaattaccggctggcggcagtattctgacgaccacttcagtgcaagcctttaatccgagtccgcatttgttagattatgcagcaacaaaagcagcaatcaagaattttacgatcaatctagcgcaacaattagcggataaaggtattcgggtcaacggggttgcaccaggtccgatttggacaccgttgcagttggctcaaggacaactggaaggggctttgcctaagtttgggcagaatacattgctagaaagagccggccaaccggcggaattagcaccgctatatgtttttttagcaagcaacgcagcaagctatattaccggtcaaatttacggcgttaccggtggcgaatcaattaattaaacaagtgcatttacgataatctaataatattgataagcgtattgttttacggatgctggttgaatttgttacatttatggagaaccaacaatatattttaaggaaacaagaaaggatgattgttatgttacattggttatgggttttaattattggcgctttaattggggtgattgcgggggcattgacaagtcgtgatttacctgcaggttggatcggcaatatcgtcggtgggttagtcggcgcctggctaggccaatcattgtttggcagctggggaccacagcttgccgggatggccttaattccatccattatcggtgccgtgattgtcgttttcgttgtttcattattattcacacgtagaaaatcctaatacaaaggggcggacaccatgaataaattaactaaagtggtgatcagtttagccagtttgcttgggttgtgtcaggtagcgtggtttatcacattaatctatccactacaacaatccaataagcaatttatgaatcttagttggctacccgaacaatgggtcggtaattttggacttggattaggagtgcttagcggcttaattttcttatatttactgctattggcattattcagtccaccgaaaaaacgccaaatgatcatcaagaccgataaaggtgaactagcactttcccgcaaagcggttgaaaaaacagtgacacaagctattattgaaaaacaccgtgttaaggaagtgttagtccatacgacgtttaaaggccgacatccaaaagtgactgccgacgttcaagcggtcgcagtggatcgcaacgatctcgatcaacaagcacgggcagttaaagaaacggtacagcaagcattacaaacaatctttgagatgccgattaaagcagtgaatgtcaaactatcaccgctaagtaatcaggcaaaaagtgatgtgaggtgagacaaatgagacgttcttattggggctttgttgttggggcagtgttggcagccatttggattagttttggatttatgagtttaatcttgattatcatcgctggtttactcggctacattgcagctagtttaacagggtctaaggaagatctagaaggatttagatcacaagttaaccgggtcttgaagcaggataaataacggaggtgtgacaaaatggtagaacaagcacatttagatgaagtgatggccaatagcaaattgacttttgaagatgctgtaatcgccaaaattgctggtaagacagcgcaaaacattgatggcttattatcgatgaacggtaatttcttcagtgatattgcggatcgttttagaaacgatagtgatccaacgaagggcatcagtgtggaagttggcgaaaaacaggtcgcaatcgacatgaccattattttggaatacggccggaatgcacgggatgttttcgaacgattaacagctgcagtgactgaagctgtcgaatcaatgaccggtttgagtgttgtcgaagttaacagccatgtcagtgacattatgactaagaaagaatggcaacaacaaggcagtaatccaaagaaaagtgattctgaaaaacgcgttcaataaaaatagtaaaggatgatgaaaacgatggataaaccaaacaaaccaatggataaaatgatggataagacaatggatcaacataccgaaaaaatcgaaaaagaattgaacttctcggatggtgtgattgaaaaaattgcgggccaaacggtgcatgacatcgatggcgtcttagaattatcaggcgggatgatgagtcaattagctgatcgtttcagagaccaagaagattcgacaaagggcgtcgacgctgatattgataaccaagaagtaacgattgaattggatgccatcttggaatacggtaaatcagcgccagacatcttcgaacaaacaattgaacgcatcgctaaatcagtacatcaaatgactggtttaaacgtgacgaagattaaaatgaatgtctctgacttgatgaccaagaaagaatgggcagcaaaacaagattctccaaaagaagataaataaaaagaaggtatccggtgggccggataccttctttttgtatagattagtgttcaaattggtttaaatctaaatttaatgccgttgcgactcggcgaccgtattctggatccgcttggtagaactgtttgacttcgcggatttgaatttcaggttttgtaacttggccgagatttaagcgaatgttttcgattagtcgatcttgttcttcatcagttagtaagttgtaaagcttatcggctgctgaatagtaatcgggatcggctggatagttaccggtttgaccgctaagttggtcgccatgaattttggcagatgggacttcttttggaccattttcactattaggttcatagttgacgcctgtctcttggttttttgccatgatcccgtcgcgttcgtaattatgcacgggcacttttggccggttaacaggtaattgttcatagttggcacctagacggtaacgttcagcatctttataaccgaacaaccgtccctggaggagtttgtcaggggaagcttcaatcccaggaactaagttagcaggtgagaaagccaattcttcgatatcctcaaagttgttggttggattttcatcgagtaccatttgaccgatttcgattaaggggtaatccttttgtgaaatgaccttcgtcacatcaaagatatcttgcggatagtttaaaccagcttcataaggaacaagttgaacggcaacggtccaacttagatggtcgcctgtttcaatcgcatcgaataaatcattttgtagataatctgtatctttaccagccaattcggcagccagttcgttacttaagttatggacgccttggtttgtcttgaagtggtattttacccagaactgctcaccagcagcattcacccatttaaaggtatgactaccgtagccatgcatcatccgataactagcgggaatcccgcgatcactcattaaaatcgtcacctgatggactgattcaggtgaaagtgaccagaaatcccactgcatgtcttggcttctcgcgtgtgttcgtggatctcgtttttgggagtgaatgaaatcagggaatttcagaggatcattaacaaagaaaacgggcgtattattaccaacaatgtcatagttgccttcttcggtatagaacttaagggcaaatccacgcacatcacgataagtatcgggatagccggcttcaccagctacttgtgagaagcgcgcaatcattggtgttttcttaccagcaccactgaaaatggctgcctttgtgtaggcgctcatatccttagtgagttggaagtaacctttagcaccggcgcctttagcatgcacgacccgttctggaatccgttcacgattaaaatgcgcgagtttttcgagcaattaataatcctgaattaaaacgggaccgcgttgaccagcagtttgcgaatgttgattatccgcccacgtttggccctcattagtcgttagtttgtttgtcatgtaaatagcctctttcattgcactttgtgcccagagagataagacagggtcaactcaactatattatttctcagcgaaactgcaatattattgcttgtgcaaaaagccactaaaaaacggtttacaactaataaaattagtcgtaaaccgtcatgttatctgctgatgagacgcggcttaatgtattgctggtataaataagcagccccaaaaaagtaactagttgccagtaaagtgacgagcggcaaactttgaaacatttggtgtgggagaataatggccaataaagggaaggcgtaggcggcgggaattctgacttgtagcagatagagtaatgcccaaactagtggcagtgcaattaaggttaccaataaccgtgaatcaagtaagctataagcgacgaatccgattgtggcggcgccagttaatgcaaccatctgcttgatggccattttacctggatacattggtttttgtagaatttcaaaaaagacgacaagtaccggcggaatggcagccatctgtggccggccgagtaaactaacaactaacacccataagagtgcaatgattagaaaaaccagcatgacgcgatagttaatcgtggcatgatagggatgttgcagatgcaatttgcggaggctaacgaccaacatcaaagtgagcgtaaagcctaaaattgcaatgatgaatgaaagttcagtggcgttgacgataatcggtaacagccccgttgcaaacgatggtgcgagtgttgagcgaaataaacaaagtaaaacaatcatgatgagtagtagtaagctaattttaactgcataactgagcggcaaccgattaatgccaaacccaacgatggcggttatcgatggcagccaaaatatcttggcgggttgattgagccaacccggttcgtgataaatccacagccccgttgttaaggctgcgatttcgggtagaataatctcaacatcgttcaagacagtggcaatgcccaccatcaataatacgaatccaaagccgagtaagtaatccgatagttttaatttttggggtttcaaaagataaatgcctccttagtgtggtttgagtaatagtatttattatacgctactgaaaaaagaggacaactcaaaaaagagcgtttcaactaacgaatagctgagacgctcttttttgaattaaataattattagtcgttcaagttatagcgtaatttcatgtgttctgagcctgaaatcaccatttggccaagtagggctgtttggcgtttaagtgattcgctagctagtttgttattagcggcttccaagaaggctgcagcgtctttttgatcagcgaaggccttgtcggtttcgttttggatcacgtgataggcactcattgcttcgagttcgaaggtgttacgcatatcaacgtagaagtcgtaatctgtatcgccaagtaaggcggttgtacaacttaaccagtacatattgttcaagtcaaaagtacctgtggcattcttgtatgattctggtgtgtcgttgatattcgtgtagaatggcacgacggtgttaaacgtattggcaccataagctaaccattgaataccggcaatttcagcaggcacgttgttgcgcacttgtaaaatatgcacgttgtgattccggttaattccgattggccggaaacgagttttaacatcttcaggggcgctaccgtaaggatcgtattctgtattttcaaagtgagcgctcaagacgaacttgacgtcttcgattgaaatcttgcggttggcatggcagatgaatggtaaatcttggtccattggatcttgtttgatttctggattgaagtattgttgaccgtaccatgttcgtgggttgttataaaccgtatctttgattgaagcactgccgaaaatatgacggagattgtagccttcaaagtctggattcaagttgttatcatcaattaaagcttttaaatcagctgagcaaagcgtgtcggctgaatcaaagtcgaaatgattgatgttcatccggttaggggcaaccacgtatgcatcatcagggatgcgaacagcagcccagtgatgaccaccgattgtttcaagccaccaaacactgtctttgtcagaaaaggcaatcccgtttggttcgtatgtgccgaattcttcaaggagggcgcctaaacgttcgaccccttcttgagcactgtggatgtaaggcaagactaatgtcacaatatcttcttcaccgatgccaccagggacaaaaggatcaagcccttgaatccgggggttagtggtaatcgtttctgtggcagacatcgtgatgttttcactgttaatcccagcagctggccaaatcccgttcgtcaataatgagttaggaattgaggtatagcgcattgggttatcaggcaattggatttgaacgccgctaatcaccgcttgataattccggggttggtcttcaggattgaccacaacaaagcgttgtggatccaaagcttcgtggccatcatcatttctagaaatcatggttgaaccgtcgatggaagcttttttgccgactaagaccgtggtacatgaccctttaattggtttttgcatgtcaaaacactccttttatttattatccatagtataacgcttttggcgggaaagtgggggattgagcggtaatcatgtgaaggaattgtttaaatgcaagtggttgagggtgccaagtcagttatcattggtattcaattcgttggtatcaacaaaaagattcggatgagtcgtcaacgtaaagcacaacatgcaactaatagggctgaacaacatgccgaaaagaaggccatacaatacagccgttttcagcaacaccagattaagaagcgggaaaaacatcggagacattgaaaaagaagaggtgggggtaatccgcatctcttccttttaatatcgtcagacaaaatatgaggtttagttaaataatgatatactcgatttgatttaaaggaaagaggggactaatgctgaagttagccgattgtttattagtgattgatctccaaaatggtgtctgcaaaagtgagcagcctgttgcgcgtcttaatcaattaattaaaggcgttaatgccagaattgatgcctatcaggcggaaagtcgcccgattatttttgtccaacataacgataagactttaattgctggtcagtcgacttggtagataatgccagaattgaatgtgcctaaaacggcaatctttgttcaaaaaacgcatgcggattcattttggcagacaaacttacaaacgttattgagccaaatgcaaatcaaatcgcttgaaatttgtggtgcccagaccaaatactgcgtcgatacaacgattaaagttgcccaccatttgggctaccaactccaaatggtagctggtctttcaactacaacggacaacgcctatatgacggctgaacagacaattgccttttacgaaaacgtttagcagaaccattttctagaattactaaaataaacggtaatctctggtacaatggaccttatcatcacttaagaggagtatctattaatgtcaaaaacagctttaattacaatgcaaccaacagaccaaacgacagggacaacggtcatttacgcgccagataatgcggccaatcgtgtgtaggctgctaaacagtccaacgtacaactgatttcgattccaggttatgttcgttttggcgatcatatcgttaattttttcgttaaaaaaattgtgaaacaaggcgatgtttcggcatacagcaatatgttacagtttgtttatttttcacacatggtggcttacaacgtggcaaatacgccagttgaaagattagtttttgcgacgtaagatctagcgactaaagtattgatgcagtttgataatcaagcacgttataataatcaaatgacagtcttagccaaataatatagaaaagccccgctcatctgagcggggcttttctatattatttttataagttaatgatttgtgcaacctcaccgtggtgtccgctagttgttaggggggcattaacaccgctgatatcgtctatgttggttacaatcaccatactggttgcttctttacccgcagaagcaagcgcagctaagtcgatttcaactaataactggtctgttgtcaccggatcgccttcttgaacgtgaatggtgaacggcgcaccgtttaattcaacggtatccaagccaaggtggagtaataattcaacgcccgttttggttgtaatcccaagtgcgtgttttgttgggaaaacactagagataataccgtccactggtgagtagatatgactatcactagggtttactgcaaaaccatcacccatcatttttgttgaaaaaacggcgtcggttacttgtttgagcgggatgacgggtccatctacaatagcgtgtaattcgagttctttgggtttacgtgagaatagtttcataatgatgactccttctacttagtaaaatattcgctgataacgttcgatgaatcagctaattggttcgtattagcggtgaaatcttgttctaagaaactgtaatagagtaggtcgacagcgtaaagctgtgcaattaatgaagtcgttgccgcgcttcttagctgactgttttcagtactatcatcatgctgtaacgtgatggttgctaactgtgcgatttgactttgattattatgagttaaaacaataattggaatattaagttgttgtgcaattttagcaagttgcagaggctcttgtttttcgccagagttagaaattaagataagtgctgcctgtgttttctgtgtggttagtgctgctgccagtagatgcgtatcaagtgattgaatgacagatttaccaacgcgcagtagtttttgttgtaaatcctcagcggcaacgtttgaagcaccaagcccataaatgaaaatggtttgtttcgagtggagaatcattgcggattcttcgagcgcgtcattcttgagccgatgattggtttcagtaatcgcttggttaattcgaaaagttagtttattttttaagtcagttgttgtatcggtcggattaatttcatcgaagagccgttgatcggtattcccttcagatgaaagtcgtaatttgagtgctggaaagccaccttgaccacagagtgttttaccaaagcgagcgacagtcgctgcactaacgttagccgcttttgcaaacgcactagttgtcattgtcggtacttgtactggatgggcaagtacgtattgagcaagccgctgttctgttttggttaaagttgggagtttcttttgaattgaaaaaagtatgctttccataaaatcagcgtcctttaaaggttatttttccattgtagcatctttgggaatgccaaagaaataagttgcgacaaagccaccggcataagctgcgagcaagcctaagatataagcgaattgatggccgtttgtaattaaaggaattaaggctaagccactaggtccgatggcaatcgcaccaacgccgcccattgcaccaatgacggcaccgccaatcccaccaccgatacaggcagtgatgaatggtttccctaatggtaaagtaacaccgtaaattaacggttcgccaatgccgaggaagccaacaggaagcgcccctttaatcatatttgtgagttctttattcttacgacaacgaatccaaagggcaagtgcggccccaacttggccagcaccagccattgctaagatgggtaaaagtaaagttgaacctgttttgttgatcatttcgatatggattggtgtgaggacttgatggagcccgaacattaccattggtaagaagagtacaccgagcgcgaaaccagagaaggcacccccgacattcagaatccaattaattgagccgacaagtgaatttgaaatcacaccggctaccggcataacgatgaaaattgtgaagaccccaattaataataatgaaattgtaggggtgacaataatatcaattgaatctggaataaattgatgcaatttcttttcaaccaatgagagaatccaaactgcgaagatgacaccgataatcccaccttggcctgcagataaaggatcgccattgaagatattgtgtaatggcaacttaggatcaacaccacttagaagtgtaacagcaccaatgacaccacctaaaccaggagttgcaccaaattctgtggcactgttaatcccaacatagattgcgagataagcgaagacgccgtttttgatgacgtttaagatggtaatgaattcagaccagtttgaaccaagggatccagcgaccatcatgtttgatagaacggcggcaattcccccgattaaaccagcgccgacgaaaaccggaattaaaggaacgaaaatatttgaaatcgactttaagacccgcttggttggcgtactcttttgttttgctttttgttttgccttaacttcagcggcttttgcttcgactttttcgcggtcggtcattgttgcggctgtggcagttgtggtgagattttctgggaagggttcaccaagtttaacaccgacttggtcgaccatgatttgggcgactttattgacaatcccaggaccaacgacgacttgaagcgtgtcttcttcgacaacccctaaaacgccatcgattgcttttaacgcagtcatatcaacttgatcatcgtcacgaattgtcatccgcacacgtgtcatacagtgaattaatttagcgacgtttgcgggtccgccaacagcggcgtaaatttctctggctaagcgtacttcttttttttcagtcataatagtgcctccttaaggtttgttattgaatagtttgacgtacaaaaccgtgtgcttgtgttaaacgttctttggcttcattagccgataaatccgttaaaatcataacaattgcgagtttaacgtcttcgttggcggcgctaaattgggttgccgcaacatcgtaagtacaatcagttgcagccatgatgattcgtttggcacgttcaactaatttttcgttggttggtttcacgtcgaccattaagtttttgtagactttaccaattccaatcatcgaagcagttgataacatattaagcaccaatttttgagcagtacctgatttgagccgggtcgaaccggttaaaatttcaggaccaacttcgacttctatattaattgtggcatgttggctgatgagggcatcgaagttgcaagctaagctgacagtactggcaccaatttggttggcataatcaagaccgccgatgacatatggggtccggccgctagccgcaataccaactactgtatcgttagcggttaagtggattgcttccaagtcttcgcgacctaatgtcggtgaatcttctgccccttcaacggcaacggtcattgcttgcataccaccggcgattaaaccttggaccagttccggttctgttccaaaagtagggacacattcggcggcatcgagaacaccaagacgaccgcttgttccagcgcccatataaattaagcgtccctcattttggaaactttgaatgataacttgaacagcagcttcaatattggggagtgcttgtttaacactttctggcacattgtgatcttcttcgttcattagtgtgagtactttttcaattgaaagttcgtccaattgcattgtcttttgattacggttttcggttgttaaatgacttaaatccatattaatcaatctcctttagttggatggcttgtccagcctgaatgaatggcagtaatgcgtgatctttttggatgacttttccaagaacgttaacacgagaatctgcgggtaggtcatgtttggtaatctgtaactcgcccatataacgtccatagtcttggttatcgagggtgatgctgccacgtaatcgtactgatgtctgttcaggttggattgtggtctgacaaagtggccggccttcttctaatctgatgacatcacgggcgacatcgcgccgattatggaaatgttggttaaaaagataaggggggcagggggctgacttaagcatgtacaaggttatgacgtgttgatggtagaatgcatcaaattgcgctagagtggtttttgctaaagttggatcaccgatgaagaccttatctgtttcacagttgaataaatcgagcgcactagcaagcggatgctgataacgatgggcttccaaagtgggtaatccttcttcaagtggtccgcgtaaaatgccatcaccaggaacaaaagcttgaatggttaaaccttgcgttttaagccactgatttttttcagtaaaccaggttcgttctaaaccggtttcatttctagggtaataattatgccaagcttctatgttagcgaagttggcaccagctgcgcgtaaaacggctaaatcttgttcggcaattgtgcttgcgttgagggcaatcttcaaatattgtgataacttagcaatggttgaattatcgatgccgaaatcaattcgcaaaccagtaatcccaaaggacagtattgcggcgggatcgttaagtgagagaccaactgctggtaatgaacttgtttcaatatcaatcatcaattgtaagtgttcttcgcgacacgcagtgctgagtgctttgattctagcagtgtattgtgaaatgtcatcttcaggaatatgcatcgacgtgaagacttctgtgaagccagcggcgtgcattttttgaaggttcatgcggcttgctgaggtgaacggttgattaagatagatagaaaaaccaaacataaagcaactcctttctttttaaagcgttttctatagatgcagtatagcgctaatgaaattaaatttcaataaaaaataaaaaaataaatatttagtgaaattaaattcataactgtaaccagtgatgaatgtaacggtttccaaataaccgtttacattttactaaaagtttagtaaaataagattgcgatctaaaagaatgcgtttacaggatagttcttgtacagattgatttatttgtatggtgtaaatagtaaacgtttactaactaaaagagaaagaagcgactaggatgaacgacaacaaaattattatcgatccagaccaatttgctgcagcaattatcgctgggaatcccaagcaaacgaatgaagacaataaggtttatatcaagcgtcaattgacgttatatctagaatcagttttactcgccaacgattttaattcattggaagaaaaccaattcggctcagccaaagaaaagcaacgccaagcgattttggaaaaaattatcgaacatcgctatcactagagtgcgtcatcaagcgggataacccgagggttgtgcttgatgaaagcatgtttacaatgaagaaactatcgaaaggaatctaaagaaatgaaaaaactaaaagatgttaaacagtatagttcttacgcttttggggcctttgggcatgacgccttttatgcaacacttagcacttattttatgatgttcgtcacgagtcaattattcgataccaaaaatgcaggctttaattcaaaaatgattgcgtatgtcacttatacaatgatggtcattcggattgttgaaattgccttcgatccgctgattggtggagtggttgataatacacggacgcgttgggggaaatttaagccgtggttactggcggggtcaattattagctctgttggcttggccatgatttttaccaactttggagggcttgcgacaagtagcccttatctttacttagttctttttgcaatcgttttcgtcattttagatatcttctactcgtttaaagacatctcgttctggtcaatgttgccagcgctgagtgttgattctgaaaagcggacaaaatttggggcgattgcgcgtttcggatccactttaggtgcacaaggggtcattatcgtgatcgtgccaatggtggttttcttctcgcaactattttctgggagtcatgggagtgaacaaaccagtgccgggtggttcggttttgccgttgtcattggccttgtttcattcttaggcgctttagcaaccatcttaggaaccaaagaagaaaagagtgctattcgggaaaatactgaaaaggttcggttacgtgacgttttcagtgtgattggtaaaaatgaccaattaatgtggttatctctttcatatttcttatttgcctttagttatgtgattacgaactcactgcttttatattattttagatatgtcatgggccgcgccgcagcgttctcaacggttggtgtgattactgccatcttagggattgtgtcagttgcgttgttcccaacattggttgctttaattcatcgccgggcaatctatcttggcggaatcgcaatgatgatgcttggttatatcctcttcttgtttgctggaagtaacttggtcgtagtcttaattgcggtcggcttattcttcttcccatatccactggtctttttggctgctttgatgacgattaccgatagtgttgaatacggacaattgaaaagtggtacacggaatgaatctgtaacattggcagtgcgacctttattggataaactagccggggcttttgcaaacggcgtcgttgtaacggctgcgattcatgctggcatgactgggaatgcgaaaccaagcgatatcactaacgcggggttgttgcaattcaaaatgtacatgttcttcattccaatggcgttattggttatttcagcgttaatcttcatggctaagattaaattaacggaagcaaaacatgctgaaattgttagtgagttggaacggaaattagattaataacaaacaaagcgtagttagtctatgcttgaaccagaggctgcatcaaaagtaattttgatgcagccgttttatgactgattagtttatgggcttaacttgacgctgagaatgccgatgacttcttggttaacagtgcccaattatttgaaccagtcgtcggtcagtcggtagattgggtgctattcagaactaaaatcgaaagagccggcggaacggattctgcttttggtttgactgaagatggtgactatcaatacaagacggcaaaagggcttttttagactactattatcaaaatgtcttctttcaatcatgtaataaattgtatcgaagagcgattattgaagctgaagcattgcggttcgatgaatcgctgcgtatcggtgaggatttaattttcaacttgcagtatttacaacattgccgagttgttaggcatcgggcagcgtttttatatgtttacgagatagggcatgctgaggcggctacgagtaccctaaagccgcagtggttctcagttaacttaacagctctgcacatcattgagacgcaattagtggctggaattgcagaagtggatcgcgcagcttacacacgatttttaaagcagtatgtgcggaccttttttagaatgttaattgtttttgatcagcgcacactgactgttcctgagcgacaattcattcagacgcaattgatcaatttagaacgtggtttaccaaccggcacatcccggtggctacgatggcttaatcggtcgcacttagcgccggtcatgctagttggcttacgtcggttaaagcaaaggttaaaataaaatgctgtccgccagaatcgaacgattcaaaagggggacagcatttattggttcatatctaaaaaaggatgcggtgggcgtttaaacaaaggggaattgactgtgaaaaagatcagtatcgtgattgtaatcagtagtattgttgtgattagtctggcggcgctaggtttttatttgcatcaagaggataaagctgttgatgcgattaaaaccgggtctagtcgaatttcaaaacaaattgatcagtgaaagccaatctcgttcctattattaggcgttgacacaggcgcggatgggcgcgttgatcgtggtctgtcggattcgatgatggttgcacttaacccggtgtaagaagcaacggtggtctactctattccgcgtgattcattggcagagatggcagatgaccacggcggtaatattcagaaaattaatgcggcttatgaaattggcaaggctaagatggcgaaaaaaacagtcagtcagtttttagggctcccgattgactactcggtgacggtcgatatgggcgcactcaaagaattggttgattttgtcggggggattaccatcgatacggtgattgacgttaatttgaatggacaagtgattccacaaggccaccatcatctcaatggtgatcaggcgcttgcttatagtcggatgcgttatcaagatccgcgcggggactatgggcggcaattgcggcaacaagaagttttgaaacaagttgcgcaaaaaattcaaaagccaaaatatttgatgaacattggtgacttaatgactaagcttggtcagaaaattagcactgattttacagccgaccaagtgaagcagttgattcgcaactatcatcaaagtagtggtgaaattgtcagcagccaattgctaggtaaaacggcgtggcttaacggcagtgcctatcaaatcattagtacagaagatttgcaggctgcttcgaatcggctccgtgaaaatttagcactgccggaacaaacgttaaccaataccgaaacgcgacttaatgatatgaacccggccttttttgatgatgagtcgccaacgacttacttcaacgtgcgcggatataacgtgacacggtatacaaataatacgtattagtgttgtggtcgaagtgcgtaggtttgggtggcgatggcgttaacgaaatcaacatcatgctcgataaataggagggttgggcgttgctcggcaattagagtttgaacttgttcacgcgtgatgacgtcgaggtaattcaacggttcatcccagaggtaacagtcagcctcttcacagagcgaacgtgccagtgcagctttacgtttttgtcccatgctcatcgtttctagacggtgggtaaataaatcgcggtcaaaacccagtttgcgtaacatgcttagcagttgttcgtgatcaacctgtttcgcagcagcgaagtcggccagtgagccgctcagttgatcgaaatcttgtggaagatacgagagggttaagtgcggattaaggtgcagactaccgctggcaatgtggtcagttgcgggtaatgcaagtaacgccttaatcagtgttgatttacctgcgccattaatcccagttagggcaacctgttgaccagcttctaaggtgaatgagagtggttgattaaggatgacgccgtcttgttgtaagacaagttcatcaacactaagcacattttgaccgggtttgaggggtcgctgattgatggtcagtggtgcagcaatttcaacgtttttaaaaagttgttgttttgcttcgattgcttcttccgcgcggttggcaattgtcgtcgcccgtttcataaccttagcggcgcgatgactgatgaagcctttatcgagattggcactttcagttttgacactggcggcgtttttccctttttcagcttcgtgggaccactgcgctttttgttgtgctgtttttgtcagccgtttgatatcgcccttgagttgttgattctgttgttgctcataagcagcttgttggtcgtgggcggtttgccaagtttggtagttgccttggtgaacggtgatgtcggcacgattaatcgctaggatatggtcgatcacttggtttaagaaatggcggtcatggctgacgacaatgaagccggctttttggcgtaaataattggcaacgacttggcggccttcttgatccaggtgattggttggttcgtcgatcagttgaaaatgatagtcgtcgatgaatagtaaggcgagtaacattttggtttgttcaccaggacttaacgaagcaaatggttgccagacgatttcgggtgcgacttgtaggagccgcagttcccgctcgacttgccagaaggttgaattgtcgaggttacctagctgcattagaatatcgcgtgtgagttgcgtaggttctgtaacagtctgtgggaaatattgaaaatcgagattggtaaccaactggccatcaaatggtagttggtgttgaagtaattttaataacgttgttttaccgcgaccattgcgcccgattaaaccgagtttccaactggcgtcgaattgaagcgtgacgtgattgaacaacggttgtgtttgatctgaatagttaaatgtgagtgctttgaattgaattgtgcccatgaattatcacctcattgattgaatgagattggcccagttgtcgttaaaaatgcacaaaaaaagacgcaataacagcgtcttttaacaagtctttaggtaactgacctgaaaattaacgcaagcaatctctaacggcaatcggaaataaacggttcacgtacgtgcatgaacagttcgtaccaatcgagttgtcagaaaaatagcatgcgattttcaatgccagtcacatcctttgaataagttaaatttgattctagcagattatttttagaaaacaacttttaaaataattctttacaaataaatggttatcccctatactaagtaactaattaataacaaggagggtctgtcatgaattcaatgcaacgtgttgcctttagctttttctttaagatacccagtaatcgactggttgattaaggagaaggcatttgagttgaaatgacaaaccttaatgaattggaagatggctgggtaaccccgagtcatcttcctggtggagctcactagtgaagactagtgggctcctttttttgttattaaatgagtgcgacgaagcctggttagatactgagtaatagcatagtccagtgaataaagctggattgtagctttgtttactggacgtagctatacggaagtatctggctgaggagcacgttaagaaagaagtgcgacttgaacgatttggcttcgagcataacctaaaaagcgcaatggtgggcgtacgaccgccattgtgattctgtagttaagcgcagaaggcagttcaaggagcacgttaaagaagtgcgacgaagcctggtaggcggcgagtaatcgcctagtcgagtgcatacaataaaaataggagtggttaaaatgggattaatggcaaagatgttacgaaaagaatcactggaacgttatttacaacaagatcagcggttggccaaaacattaacggctaaggatttaattgcattgggcgtgggggcagtgattgggaccgggatttttattttaccgggaacgattgcggcgttacatagtggcccggcaatcacgatttcatttatgattgcggcggtcgtttgtgccgttgcggcgatgtgttacgccgaattttcatcggcattaccagttgcgggaagtgcttactcatatggcaatattatttttggtgagttaatcggttggctgcttggctgggctttattcttggagtatatgttgtcagttgcggcagtttcaactggttggtcggcttattttgtatcatttatcgaagggtttggcatccatattccgcatgcaattactggcccgtttgatccggcacatggcacttatgtgaacctgtttgcgatgctggtagtgggcttgattgcgacattattaatgcgagggactcgttcatcaacacgaattaataatatcatggttttgattaaattaggcgtagtgctacttttcattggtgtcgggattttctacgtgaagcctactaactggcaaccgttcatgccgtttggggtaagtgggattttcaaaggggcatcactcgtcttctttgcttaccttggctttgactgtgtgtcagcatcggcggcagaggttaagaatccacaaaaaaatcttcctatcgggattattgggacgttaatcatctgtacgttgctttatatattagtggcgtttgtcctcacagggatggtgtcgtaccgcgaattggacgttgctaatccggtcacattcgcgctacaagtcgtccatcaaaattggtttgccggtctgatttcactcggcgcattagcagggatgttcacgatgatgttgacgatgacttacagcagttcccgcctcatctattcaattggtcgtgatggcttattaccaaaagcacttggtaaagtgactgcaaaacatcaaaccccaactaacagtatcaaaattgtgacggtagtcatcatgattctaggcgggttcgtttcactggatcaattgactaatttggtaaacatcggcacattggtggcttttttctggatgtcgattggggtcatcccattgcggaagcgcaaggacattccgaataaaaatgggtttaaagtcccattttacccagttttaccgttaatatcaggagcgctatgtttattgatgatgtttgaattgccaaaagtcacttggattgcagcggcaatctggtttgtcatcggcttagtggtctactttacgtatgggattttcaatagtcgcttaaataatgattaaatcagcctcaaaaagctgacgttcacccgcagaaacgctagaataaaacagaggtgacgactgtggtaaaacataaacggctgtggattggtctaataggaagtgtcatctgcgtcctcggtgtattagggacgtatttcgatgctggtttgtatcagcaaccgattattcgggtaacgcgggtccagacaattagccgtgagaaacagactgatgagtaccaaaatgaagatacagaagtagtccagcgggtcacgggccaatttttgaacactaagcaaaaagggcaagtgattacgctgcgcaatacgtatacggcgtcgcaagcgatgtcgacgcggtactataaagggcaacaagtctttttacaccgtgatcaatatttgaaaaagtggaccttaaacgagcctaagcgcgatacaatcatcgttggcttaacactgttgacgtttagtttcctattactaatgatgctcaagcgcggattgatgacgctaatcagtgtcttggtcaatctcgtcgcattcgtcttaacactccatttaaacgcgatgacgggtggacggtggttattgccgattatgtgtggcttagcggtcgttctaacgggtttaacgctacttttagtattaggacccaaccgccagatgcttgtctcatatggcgcgacaattggcgcaacgttcctagcactgtttctcagcatggccgtcttgaaattaaccggcgatcaaggcttgcattatgaaacgatggcctatgaattacagccgtataaaacggtcttcttagcggaagtcgtgctcgggattttaggcgctgtgatggatgagacgaccgatatttcatcgtcactccagcaattagcgattgaacggccaaacgttacgaagactgaattgtttaaatcaggactcgcaattggtcgcgaaattattggtccgttagttaatgtgttgttctttttagtcatggcggatgcttttccaattattttattgtatctacgcaatggcaacacaattgcgtataccttatcgcgaactgtcacgttaagttttacgcagacggtgattagtgcgattgggattactttggcggtgccagtaacgagcttgttggcaagccagttagtgcgggtgagacgcctatgatgttgctaacgggaattttactgatcttattagtgctggtttgtggttggcaagggctgacgattttcttcagccttggtttgaattttgtcgtgattatattggcactggtcttggtggcgggtgggtttgaaccgctgattgtgagtggtctgttgagtctgattttgttagcgacatccatcttcatgaataccaagcagccattaacggccaagacggcgtttgtgacgtcgttaatcgtggtggtgggcttgctgatcattattgtgcccctcagccagttagcagctacctacggctttggtgcggaagatgcagaagagattgaaggctttggactcgcaatcggcttgtcgttccaaaaaattagtatcatgatgatcattctgggcagcttaggggcaatcgccgaaacgagtattgcagttgccagtggtttagtcgaaatcttagaatacgacgcgcaaatgggctccaagcaactctttaaagcggggattgcgatcggtgaaaaaattattgcgacggcttttaatacactgttctttagttttttcggtagcttcttgtcattaacgatgtggttcattcaactcggctatccaattagtaaaattgtgaaccataaaattttaattggtgagggactcgcactattaatcggagtgattggggtcatagcaaccgttccgctgaccagttggctcctaaactatttcagaaaaccaaaagacgaataaagttaacttgaaaaataagtcaattcagattagaataatagaatatatgcacgaaaggaggaaacgcgcaatgtcacaaaacttacatgttagtgtttctggtaaccgtcgtcctgttaaccaaaacaatgctaaaaaacgtaacgctgaaacagctgctgtattgaacttcttgaaggaacgtaaatcagctaaataattataatgaattttttcaaaataatgttaaaagaccatctaaaagtcgcttgaaaagcagcctttggatggtcttttaatatggaaaataaatatatttcaaactaagtttaaccacaaaaaaagagctacatcctaagatgtggctctctttaaatacatatttttgattaaaggacgcgaactgcgaatgaaggcatgaagtagcttgagatacttgctatcttaactgattcgccacgttgtggtgcgtggacgtattggccaccaccgatgtagattgcgtcgtggtatgaagcaccagcgccaccccagaagaggatatcgccaggttgtaagttatcaagtgagacgcgttggccagcaccttcttgagcagttgtgacacggcccaatgaaacgccagcttgtgcgtatgcgtattgcactaaaccagaacagtcaagaccaacaccaggtgttgagcctccccatacgtaaggtgtaccaatttgtgataaagcagcgttgataacagtttgtgcgttaccacttgcttttgtcgttgtattcgtttgtggtgcttgttgagttgttgtagcttgagttgtttgttggctgctttgagttgtcgttgtttgtgtttgagcaggttgtgttgttgctgctggtgtacttgttgtagcagcaggggttgttgcttcagttgttgcagcaggcgctggtgtttctgtagcaggtgccggcgttgttgcttgaggagcagctggtgcttgaacttcagttgtagtggttgttgcagcgactggtgtcactgcaggtgcatttgtaattggtgtgacaccatccaagttagggttgtttaaaacaacgtagctagcaggaatccaacctttgctttctaattggtaccaagttgtgccgtttaaatctttttgatcaatgacgtttttagttgtgccatatgttaagtattcgccagttggttgagcagcagttgtgtcagcccaaacagttgttgcacctgattggaagttagctgttactgtgttcttaacagcggttgttgttgcagctggttgagcagttgcatcgccggctgtaatgaattggcttgaaacccattcgtcattaccaagtttgtaccatgtttggccgtaaacttgttttgtgtcttggattgttacttgttggttagttgccaagtaacgagcaggtttttgacctactgctgggctagtccaaacggttgttgccccgtcagcgtagttaaccgtaccatttgttgcagcttgggcatcatttgtttgaagacccatcaatactaagccggcaaggccaaccattccagaagataagtaagtcattttttgttttttcatgtgtttgttgtgctccttcgaaaaattttttaagttgtttgaattttgaattaatttagtacgctgattagcatagcatctgaaagtaacaaacatgttacataatagttagcgcgctgttacatgtttcttaagatatcggcgattaaaagactaaacgtaagcgaacgtcaaaaaagtacgcatatcaagaagatagcgtactttttaggaagtgtcttaagattattggagtgtaccggtttgtgtctgatctgtaccggtctgagtattactttgtgtaccagtcgtcccggttccggttgtggtatccgttgtcgaagtccccgtcccagttccagttgttgcaccagtgccattccccgttgccgtgttagcagcatagcctgtcgtagtttgtgtattggtagctgtgttttggttagttgttgcttgattagcggttgttgtgttttgcgtggttgccgcttgggtattgttagagtaagtgttgtattgattttcagcgttcttaacatacgccaagtacttttctttaaagccgtcatgggttgatttattaatcaaagctcggacgtaagggaagtcgctagcagataggttagctggaatatgcttgaggttgtcgtctgtaaataagttccggacagctgccatagccgctaattgatttttagcttcttgataatcagcaagttgtttggggtggtcggtatagtccgtttcttcaccaagttgtgcatcggctttgacaatcccatctttatcgaaaaaggcgcttgttttaactttgttctttttcttctttttagcaggcttttcagaagcaacactttcagattcactagttgctggttgcttaccagtaatcttatctagatctttttgggcagccttgtaatcagcctttgcatcagcgctaattccgctcatataaaggttgggcgtgatttgtttgtcgagtttgtcagccgcagtgataatttggtgttgtttattggctgttaacttcgcaggatctttacgggaaccatcactatagagttggttcactttttggacgtattgatcaattttttcttctgttttagttgcggcagctggaatttctgttttattctgacagccagctagaatcatgaaacagctggtcatggtcagcaatagagcaagtgttaattttttcattgagaaaccaccttgttgttagttattcatctaataatatatcatgaaattaggagcgctaacatggtcgtttgacgataattccgaaatcggaaattaacgtgaaatccaatattgtatagaaatcgcaataaatgcgggggttaaaggaaattaatcaacaaatcaggctatactttcgcaagtgagaagcgtacactatggatattaattatgagaaaattttaatcaaacgtgaccgatgagttcaattaaagtggtcatcagagggagtgcaacttatggaatcagcatgtacatcaattttagttggtaaaaacgcatcattggacggatcaacgatgattgcgcgtaacgacgatacttttttacctttaacaccacaacggtttcacatcaatccagctgttaaagggcgtaagggtgctaaaattaaatcttggttaaacgggtttgaagccgaattacctgagaatggctaccgatggcccgctgttccgaatgttgattacaaacataatggttattatgatgaaagtagtattaacgaagttaacgtggcgatgagctgtaccgaaagtacatatggaaatgaaaaagccctcgcttatgatccattggtgaaagacgggttggatgaagattgcatgcaagctatggttgcgccgtacattaactcggcgcgcgaaggggtcagctatctcggtaatttgattaaacaatacggctcacccgccggcaatagtgtgctcttcagtgatcacaatgaagtgtggtatatggaaattgtgacagggcatttatggctagcacaacggattccagatgatgcttatgcagttgccgccaaccaagtggcgattcaacaagttgatttcacggatgccgacaattttatgtgggcagaaggcattcaagaatacgttgaagcccatcatttgaatccggataaaacgggctggaatttccgccacatttttggcacgatgaatgaaaaagaccggcactataatacaccacgggtttggtacgcccatcatttatttgatgctgattttgatatgtcacccgaatcggctgaattaccatttattcggcgtattgaacataaaattagtgttgaagatattgaaatgttgttaggctcacattataatgaaacgccattcgatccaatggggcatgggactgatgccgacaagtatcgttaccgcccaatcggtttgaatcggacgcaaaatgcacatattttacaattacggaatgatgtgccaaaggaacaagcggccatcatgtggatcacaatggggatgccaacgtatacaccgttcattccatttttcacgaatgcgaacgatacggatctaagtttcagcgaaacaccaatgaaatgggatatgaagagtgcatattggttataccggacaatttcagtattggtggaaggccattatagccagcacattcaaggcaatgtagattacttaaaccgttgtaagcaagaattacgaacgatgattgaagccattcaagtggaagcacaaaagtatcaaggcgctgccttaacggagtatttgactgagcaaaaccatgcgattgttaagcagatggcgactgaagcgacctcgatgattggggaactcgttatgtcgggcattaatttatcgaaattgacgttcaatatggatcgtaacctgtaagatgttattaaaagaagttattaaggatgaaaataattttatctttaatgacttctttttatatagtcacgacaaactaatatagtgggttgatgattatatggtcaattgaattgttgcacatcaaatctatttatagctatttaatgaatcgagtggtttcttttctctcaaaatatgctaatatattgatagcaaaataaattaaatccgttaattgtttctacgcatgacagatcggttagtaaagggagaaaaggttatgacagcaaaagcaacaagcaagtattctgatgattgggaagtagtaacgcatctttcattgatttatcggtggattgtcagcaatttaagcgactttgtcagtggagaaagtttaaattacaaagtttcttttgaccaatttttaattatgtacgaaatttcaactaacgaaaacttaacaggtagtaagttagctaagacgatgagtgttagtcgttcagcaatttcacgccaatgtcggttactgaaagaaaatgggtacgtggttgaagaacatcttcaaacagatcaacgggttaaatttttgagcttaactaaacaaggtcaagacgttttagaccggttggtgagccgctatgttgaaaaataccgtgaaatcgaagcacaaatgggccgtgataaagtcgatggtttgattcgattcattgatcaattctatttagatgtcattgaaccaagtgaataccaagataacaagatgggccgttcattcctaaataaagtaaagaaaatgaacgaagaaagtgcagaatagttattatgaaataggaagaaccgcgtgggggcggttctttttttatggataaaacgtgctttttggttgcaacaacttccgcttaatacaaactagcacttaatcttaaaatcgagattaagcgctagtttgtattaatgctcagttgctgaccgcaaccaaatgcattcttgccttaaacgtgctttcatcaataacttcctgtgctttgctacacttatcaaatcggcgattgcatcgccaattcgctaagttagataaatgctcagaagttacccgttgatgacgcactctgatataatagggcttgtttctttttatgaaattgcttacaattaagccatgaacggattatgaaagagtgggagtcgatatcatggaaaaaattctggctattaatgcaggtagttcaacactgaagtggcaattatttgaaatgccgtctgaacgagtaatcgctaaaggaatgattgaccggttaggcttatctgattctgtattcacagtgaagtatggcaatcaggaaaagtttaaacaagtccaagatattacgacgcacgaacaagcagcaacgttattattaacgcggttgaaggaattaaatatcgtaacccatctcgatgagattacgggggttggtcaccgggtggttgctggtggagaagccttcaaggactctgcagtaattaatccggtcgggcttgatgagattaatcgtttggctgaatatgcaccattgcataatccaacccaagcttattacattaaaattttcactgcattattgccaggcgtaccggaagtggctgtttttgacacgtcattttacagtacgttacctgccgaaaactatttatacagtattccgcaagcgtattatgaaaagtatggggcccgtaaatacggtgcgcatgggaccagtcatcggtttgttgctcatcgagcggctgaaatgctagatcagccgcttgaaacgcaaaaaatgatcacgttgcacttgggcagtggtgcatcaattaccgcgattcaagacgggcacgctgtcgatacatcaatggggttcacaccacttgcggggattacgatgggcacgcgatctggtgatattgatgtctcattagtagcctttttagctgaaaaattaggtaagacaatgccagagatgatcacaattttgaaccataagtctggcttattagggatttctgaactatcaccggatatgcgtgatttagaagaaaccgctgactcacgaccacaatcccaattggcgcttgatatttttgtcaatcgagttgtgaagtatgtcggttcttacgtagctttaatgaatggagtagatacgctggtctttactgccggtagtggtgagaacggcagtgaattacgggctgccatttgtgaacaactcgcttgttttggtgtagaattggatgaagataaaaataatgtccgcagccaagaacgcattatcagcagtgatcaatcacgcgttaaggtcctgattgtgccaactaatgaagagttgatgattgccagagatgttatgcggttaaaataagggagttatgcaccatgccacaaaaaccactatcagaatatgaagttgagattccccgattgagtgctcgattagaagatacaccagccacaaaaacctttttcgacgcactaacaccaggctatcaacgcgaatgggcacgttatgtttacggcgctaaagctgaagaaacacagcaacgacattatgttgaaatgtgtcaaattttagatgcaggttataaatctaaacgaggatacggacaagcaaagaaaaaataaattaaaaaaagattaatcaggccaaatgcgcgccagattaatcttttttgtgttctttaataaagcggttacaaaaaagagttgaattctcaaagaagctcctttataataatcaccatgatagttagtaaaacgttttactagcctagaataaaggacggaggattgaatatgaatgctgtcaatatcttaattggattaatgccgatgattggttggggattgttccctgtgatcgttggtaaaattggtgggaaaccagcgagtcaaattattggaacgacacttgggacattaattctggccattattgtggctattttccgcgggacaccgattccagaaaccaaaacatttattttttgtttaatttcaggggcttgttgggcattagcgcagattatcacctttcatgtttttgaaaccatgggtgtttctagaacgatgccaatcacaactgggttccaacttgttggggcatctttgtggggcgtcttcatcttgggtaactgggcaagtacacaatcgaagttgattgggttcacagcgattattctaattatccttggtgtttatttaacagcctggagtgaagatcgttcaagcgctagtaaaaatggcgcggtgcgtggcatcttgttattattagttggcgaactaggctacctagggtactccgcctttccacaagcagtacacgcggacggtttccaaggctttttgccacaagcattaggaatggcaattgtaggtgttatcttcggattaacccaaaccagcaagacttatcaacctttcaaagaagcaacttcgtataagaatatcttcagtgggttcttcttcgcgtttgcagcgctgacgtatcttatctcagcacaaccttctgtgaatggcttagcaacggggtttgttttatcccaaaccagtgtcattttcgccacaatcggtgggatttatgtgttgaaagaacaaaagaccaaaaaagaaatggttgccgtattaattggtttagtactcgtattagtggctggatctgtgacagcctttatcaaataaaaagtggggtggatttattatgcgaaaaacacaagttatcaattcacaaatttcaaatgtgatttcaaacatgggacattttgatacaatgagtattggcgatgctgggatgccggtcccagctggaacgcaaaaaatcgatgtggccatcgaaaatggtgtaccaagttttattcaagtacttaaaaatgttctaacagaattggaaattcaaaaagtttacttagcaaacgaaattaaaacagctaatccagcacaacttgaacaaatcaaaaaagtgattggtgagacgcccattgaatttattgatcacgcacaaatgaaacaggacttggggcaggccaaagcatttgttcggacgggtgaaatgacaccttattccaacattattttagaaagtggcgttgtattttaaccattaggagggctttcaaatgaaaaaagtaatcgtattagggtcaacaaatgtcgacacaattttaaacgttcagcgttttccacaaccaggtgaaacattagcaatggatggccgcgcagttgctggtggtggtaagggtgcaaaccaagcaatcgcagctgttcggtcaggtgcgcaaacagctttcattagtaaggttggtaaggaaggcgccgctgatttcatgctagatacgttcaaaaaagatggcatgaacattgatcacgttcgttgttctgaaacagctgggactggccaagcttacatcatggtggatgctagtggacaaaatagtattttaatctatggtggggccaaccaagatgtgacagtcgatgatattcatgaagccgaagaagccatcaaagatgctgacagaattgtcgctcaattcgaagtacctattcctgcaattattgaagctttcaaaattgcccgttcaaacggcgttcaaacgattttgaaccctgcaccagcgattaaaaatattccagctgaattattggcagtgacggacatgattgtccctaatgaaacggaagctgaaattatcacagggattaaagtgactgacgaagcatcaatgaaagctaacgtggaagcgatgtttaagatggggattaaagtcgttatcattacggttggggcaaagggctcattctatgcaacaccaacaacaaccgggtttgtaccggcatttaaagttcaagcagtcgatacaaccgctgctggtgatacctttatcggtgctttaagtacgaaacttgaattggattacagtaacattgaagcagcaatgacttatgccaataaggcttcttcgattgcagtccaaactaaaggggcgcaaaattcgattccttatgaaaaggatattcagttataatcatattaacagcgtccatggctagccggctgtgggtgtttttattaatttgattcgggggagtgccaaaatggttcgaaaagtaacgattaaagatgttgccgcgctggcgcaaacatcggtcacaacagtttcgttaattcttaataataaaggtgagcgctttagcgcagaaacgattgcgcgggtcaaagccgctcgggaaagacttcagtatgaacctgattatttcgcgcaaaatatgattaataaagaaacgaagacgatcgcggtattggtgccggatatcaataatcctttttttagtcagtttattcaaggtgtcgaagaaattgcctatcaattcgatttcatcccattaatttatagtgcaggggcgcataatcagaaagttgatcattatttaaaggaattggttcgtcgaaatgttgacggctttattttggctgtccctcatttacaaaaaacaacgttggatagctatctgcaaaaacgacaaatcccgtttatcttattagatcaatcagataaacaacatgcgggagatgaaattacggttgccgatacgcaaggtggagagttggccgcacggtatctcattgaacgaggccatcataaagtcggaattgttttaccagaacaacgagcttggaacatcgaacaacgattcattggttatcaagccgcgatgttgaaagcccaattaccagtggcggatgagtggcaaataacgacaccgttaacgaaattaggtggttaccaagttgcacgacaggtgattgatagcggggtaactgctgtatttgcaatcaatgatgaactcgctatcggattgattcgtgggttacgtgaattacgagtacaggtgccagaagatatctcagtgattggctatgataacatcgattggtgtgaatatgtcacaccaaaattgacgaccattaagcaaccgattttcgagcttgggcaagaagcaacacgtctattattgaaccggattgtggagcctgctattgcgccacaacaaaaagtactttcaattgaattagttgaaagagagagtgtacaacctatacatccctaaatccataaaagcgtgatccgcatgaagccttgttatcaggcaacttatgcggatcatgtttttttatttgtctaaaaatgaaaaaatgcttgtaaatatgtcggaaagaactagacttaataagtcttaaagacctgtctaaaagactgattaaagagagaggttatgcgtttatgtatgaattgctgatgttatccgccttaatgagccggaatatgtcgggctataagttgcggattatcttggaaaatgcgatggtgcccagacggaaaatttcaaatggggttttgtatccgttgttagataaattggaaagcaaaggctgcattgggtttgatgaagctgatcaggattcacgtggcacgaagattgcacacattactgaagagggacggcgctattttgctgaattaatggctaaaccagtcgttcatgatgcaaagtgggatgatgcttatcgctttaagatgcgtgggatgcactacattgatgcagcagaacaagtcagcattttacaagatttctacagtgagttggctgaagatttacatgtttatagcggtgtggaaaaacatctaactgaattaaaagatgcggatgagacaatgacggattattattattggcagattcgttcaaccgatttcgtaatcacaacgatcaaagccaaaatggattggctacaagcacaaataaatgagatagagaaaatggagatagtaaaatgaaaaaaacaaccaaccgctggatagcgctggtcgcgatgagtctgggtgtctttatgggattgctagacgtaactgtcgtcaatgtcgctttaccaagtatggcgattgattttaaaacaacttttagcaacttacaatgggttttgaacgcctatacattgatgtacgcggtcagcttgttgattgtttccaaattaggggacatgttcgggcgcaaaaaaatttttgtcatgagtatgattttattcacagcggcctctgtcgttaacggactggcaccaaatttattggtattagatattggtcgcgcggtccaagcgattggtggctcgggtatgatgagtttatcgatggcactagtggcgtcgaactttgaagggcgcgaacgggggactgcactggggattttaggctccgtgattggtttttcaactgctattggacccttagtagggggctttttagtcgaaaacttcggctggccatccatctttttcgtcaatttaccagtcgggattatttcagtttacttagtgattcgcaatgttaaagaaacaccagcttatggcgcgggcgaatcaatcgattttatggggatgatcttgtcagcaattagtttattttccgggatttatgggttgattcaaaaagaacaacatatgcactgggcttggacagatatgcgcattatggggtggttagtcgcttccgttttaattttagcgcttttcgtctttgtggaattgaaagcaaaagcaccaatgatgaacttgacgttacttacgaatcgccatttcgtgggtgttgtgattttagctttctcattaggcgctggcatttttgccttagccgcttatcaaacgagtttgatgcaaaattacatgggttactcagccttttcaaccggtgtgcatcaactgccaatgagtttatggtcccttgttttaggaccattcacgggtgttctaggctataaattcggtaaaaaatggttgattgcttttggatttactgtttctgcccttggtttattaatttttagacaagtgacaacgactgattttacttatatgcaactcttaccattgcttgcgctaactgggttaggcaatgcgattatcaatccaatgatcaatacagcggcgatggataatattaatcctcaagaaatcggaatggcatccggtttattgaatgttttccgccaaattggaattaccgtcggtgttgtgattctcggtttatcacaaacgaatgcctacgaaacgagtttgaagactggctttagtggtagctcaatcccgaaggcggcagcaactggcattcagcaagcattggttgaagcaggtgctttttcaggacatgcaatcgcgtgggggcaacaattagtgaagacaccgtatgccgcaaaggtccaacaaattgttgtcacggcttttgataaagggatgatcgctgttgtaacgacgtcgctagtgctcatggtgattgccatcttggcggcgcttttcttattgaaagaaacgaaaacgactgatcgagcataaaaaaagaaggttcattattttctgaaaagataagactgtaaattgtgtagcaaacagtgtaaaatgaacagagtaaaaataaaaaaagtgaggttacttacacatggctaaattagtttttattcgtcacggacaaagtgaatggaacttatcaaaccaattcactggttgggttgatgttaacttaagcgaagaaggcgtacgccaagctcaaaacgctggtgctttattgaaaaaagaaggcatcctttttgaccaagcttacacatcagtattgactcgtgccatcaagacattacactatgcacttgaaggttcagatcaattatgggttccagaaatgaaatcatggcgcttaaacgaacgtcattatggtgcattacaaggccaaaacaaagctgaagcagctgaaaaatggggcgacgaacaagttcacatctggcgtcgttcatacgacacacttcctccactattggatgcaagtgatgaaggttcagcagcaaacgaccgtcgttacgcacacttagatccaaaagcaattcctggtggcgaaaacttgaaggttactttggaacgtgttatcccattctgggaagacgaaatcgctccaaaattaatcgacggccaaaatatcattgtagccgctcacggtaactcactacgcgccttaacaaaatacatcgaaaacatctctgatgaagacatcatggacgttgaaatggcaacaggcgaaccagttgtttatgatttagacgaaaacttaaacgtagtaagcaagaagaaattaaactaattattaaagagtgtgtttaaagcgggttgattctgagcattagcctaaattcgtgaataatcgacgttagtcgattgtttgcggattgtagctaagcgcaggagtcagctttaaaaagcatgtttaataagcttacacaaataggctagcccctcaagggatagcctattttttttgcttaaaaatgacaaaatgacacgttagggcgctactaggacacttcagctaaatttgatagctaacggtaatttaaaacattttgttgacaagcaactaaaacgatgataatctttattttgttgacaagcaactaaacgaaactaaagaaggtttttttaaatgagtacattattagtaatccaagcacatccccatgttgaaaagagtttatccctagcggtagggacccgctttgtagaaacttatcgtcggacccatcctgatgatcaaattattattcgagatctatatactgaagcaggtgttccaccattgaacgatatgacaatggctgcatggcgtaaacaaaaatttgacgaaccaatggctgaagctgagaaaacactattacaacaacacgcagattggttagatgaatttatcgaagctgataaatatgtcttcatcaatccaatgtacaatcattttttaccagctgagatgaaacaatatttagatttgacggcggtcgcccacaaaacattcaaatacacaccgaacggttcagtaggtttgttagaaggtaagaaagcaatccatatccaagcagctggcagtgtttatcacgctgggggcaagtgggggatcgttaagttcttgttccgccgtttatttaagattaagagtaacgaaagttctgcacttatggatttaggcgatatgtatttaaccaatatgttgaaattctatggtgttaatcaagttgaacacgtctatattgaaggcgcggatgctcatgcagatcaacgtgaacaaatattagcacgggccctaacggaagcgacgaccaaagctaaagtattctaatttggtgtatactggtggtaacaattgatgagaggttaagcaaatggaaaacgaatcagtgatggcactctatcatgcaatcaagcaattacgctcagatagtgtcaacggtcgcggtgttcaagaacaaaaatggttgcaaaatcagctgagtgatgagaacttgaaaacgatgattccgcagctatcaatcattgcattgcacatattatcaggattagaggccgaagaattaacaggtgtagcactagcggatcggttggcggttacgcgtggcggcattacacgcgccgctaagaagttgattcaaatgggcttaattcaagcgactaaaaaaccagatgatcagaaaaaaatctattattctttgaccgctaaaggccgtgtgattgcgcaaagccacgataaaatgcatgaaacgctgaaagcgcaagttattgataaggtgaccgaaaaatataaagatgctgaattgaagcaagcagcgtctttaatcaatgatttaatgcaatttgaacgcgatttttattgatgatattcaaataggctagtccctcaagggctagcctatttttttgtattaagttatcgacggtattttcgatttgctttattgttgcgatgatatagatacaaaagaaatgccagtaatactgtgaccagaatcctcatagccaaaataacatagaacgcaacttctcttccagcgtgaatttgccaaattggcgagaataacaaaaataaaaactgtacttcactaatccaggctgtaacaacactaatttgagtaatcttggttttgaacccgattaaaaaaataaataatgaaagcaagtaaagcaacacagtgacaaatgtagtcgtatctcgagcaaatattgcaagaatttcaaaagttactttagcaccaaagataataaagaaagctgaaaagacacagagacccacgatactaataataactcgacgcagtaccagtaaacgaccttggtgttagatctttgaatagaccattaaacataataagaacctccaaataaaaatcgcgcgttttataatcaagttagccaaatacttttagctaattgataaaataaaaaacaccaagacgaatctctgttatcattgatgttcctacacaaacaatgaaagaggttattgtcttgatgcaagaacagaataccacagtcagaaaaaaaggtcagcacctaacttcgtttgaacgaggcagaattgctacgctgcacagccaaggctattccaatcgtgcaattgccagagcgcttaatgtttgtcatcaaacaatcaataatgaattgtgccgcggcgagatcgaccaagtaaaaaaagtgaatggtcaacgccaatattacgctgtatactcaccagaaacagcacaagctaagtacgaagctaatcgagcccactgtcatcgacctttgaaactcggaggattcggcacatcttggttacctggtggtgatggctttcttggtgaatgtaatcaaagatattggttacttctgcgcaaggaagcccagggctttttttaggatttcgttctcctcagacagcgaagccagtcgcttttccatcgctttgattttgtctggcgatttaccggattgagttttggcctggccctggatccacttatgaactgttgaatagccaatgccatattctctggccagttgggcagctgattcgccttgcttatataggttgataatgttttgtttgaattctttgtcgtaacgagttggcatgtaaaaattccttccttttgagagatgatttattcattataccctctcttaaaagttgtctcaggaatcagcttacatccaggtaatcgcatcgctgcatcaccgacagaattactatttggaatataagcagggaagaaattcaacgcgtcgtaagtccctgtaatccccaataatccaggagctttaccaggtttatccgttcccttaccaatcttagtagttgcccaagcattgattaatgtacctaaattatttttacccgtgctattagaagtaaagttattgtcaagatatgccggcgcatcattataccaaccatgtttctcatatccgataaaccgttgcttcatatcaatccaatgcattttccccgcactgtctttatatatcatcacttttttataatcaatgtagttatctttaattagaccattttcatcatatttaaggttcgcgccagcaagcgatccatactcatctatagcaggcatatgcactgtttcacttgaaactccaggaatataaaccgggaaagcattgtaaggatatggaatttcaatttggtcaccgttgccatcaacagggttagctacatcttcaatcgttgtaacgttgttttgaccagataaaggaatcgaaaagtctggatattcactgcccggatcagtcaaatctgaaagccagtatcgtggttgaataatcaccgatttactcgtggtcgatttaacgctttcctttttctcagaaatacttgaactcgattctgaatcagaactctttgaactcgacttactatctgagcttgttgaagcactgcttgtcgattgtgattgcaacgaactggctaatctttcagaaactgagctcgcgccttcaattgcgcttcgtgggttcacaatcttagaagtcgtgttggctgtcaccgtctccttattcacagccaccgctaatgcgctaccaaatgactgtacgattgtagtggttaagaaaataattgctaaaattagatggacgactctcttttgcatatcaaatttcctcccagttctaatgcctttaaaactttgttacatgataatttttcgatattttgactatgttcatcaggcataactttgacggtatcactacttccccctaggctagactcccaagaatgcctatgcaggggtgaatattagtcatctaaccatcattacccaagaacaatatgtaacgatataagaggttcacaactcatgagttgcgacctctattaataattacctttattacataaaatatttgtccgcgaatttttttgaaatttaaatattatgaacaaatccatttaaatgcgattatatcaacgtttagataatatatattttttgaataattacgaaaaataaacttgtatgcccttaaataatggtgtaaactggttttatattaaaggggtcacaactcatgagttatgacctactatcatggattttttaaagtcattacgtctaacttaattttgcttacaaatgttgatataccagtaattaagctggattcagtccaaaacaaaaagcgtcttccaaacattattcgttggtgtctggaagacgcttttttaacccttattgtcctttttgggttgtttctgcggttattggctcgatttggtattctttttcgatattatgggctactcggttgaagcttttcatcatttcgcgccgggtaacaatccctgtgaactccccttcatccgaaatcacaggcagataggggtgatcaactaagagatggagcgtttcttcaatatcatatggatctctaatcgtcacgacatcggtttgcatgacatctttaacggtcagcttccgcaaattttcgaaactgaggttattcaatccgagcatcgtctcggtaattaacggcatcgtcaacatccctttgaacttcgaatggttgtctaagacgggaatgctcgaatatttcaccgtggttagtagaataaacgcatgttccaaggagttgctttcttgaacactcgcaacaacctcaccgggaattaagaagtgttctttattttctaataataagttcgaaaatgcatctgaaatcatcacttggcctccaataaactaatgctacttttagattgtaacaaagagcaaacacaaaagaccatccatagctactaaactttggatagtctttagaattaggcgcgtttaaatgtaaagtgtaactgcgaaacgggttcgaaccgacgattgtagtactggatttgatattggtcaggtgtgacgtctacaacggcgtatgtccctttcaagtcacggaactgcccccgtggttgggcaatgctgccagggttcaagagcagcacaccttcgtgcatttcacaggccaattggtgtgtatgcccatagaacgcgagattagcttggctttcttgggccgctaataaaagccgcattaaatcgccatttacaccatacaagtgcccgtgcgttaagaagattcgttcatttgcaactgggacaacaacttgtgctggaaattgaccattgaaatccatattgccttgcacaacggtcatttggttaaacaagggatcatcggttgttaattcagaatccccgcaatgtaacatggttactggttgatcttgatactgcgccactaactgcacgagaatatcgcgatcaccatgactatcactcacaacaacaaaacgcatactaaacagtcctttcggcgccaaggggcgttgtttttttgaaacgtgcttcttccgacatattcttccggctagctacatcagccaaatctaaacgtgatcctgccgtcgcacgctagtctttgatccattctttccatttatcttctaggttctcaattgcttttgcgcggtggctgattttatttttttgttccaccgtgagttgggccatcgttgcatctaattctggcacgtagaaaagtgggtcatagccgaagccgttatccccacgaggaatacctagaatttggcccttcacgttaccttcaacgactaaatcttcatctggtcggtctggtttagcaaaaaccaatgttgtatggaaggttgcggtccgcttttcagcaggcacacccgttaattcatagagcaacttcgcgttgttgccggcatcgttatgatcaccagagaagcgtgcagaataaattcctggacgaccacctagttcatcaaccattagaccagaatcatctgccaagacaggtaagtgtaagatcgctgcaatttgatccgcctttaggcgagcattttcttcaaatgtcgaaccagtttcatcaatgtttggcaattctgggtaatctaataatgttttgatttgaatcccttccgctgcgaagacggattcgaattcgcgggccttacctggattcttcgtggcaatcacgattgtttgttcatcggtatcagccacttggatattcggttgaacggcgcgttcaaaactggcttgacgttgatcattggttcgcgtcacaccttggctcgcacgtaaaataagttcgttgaattcactactattgactgcttgttgtccgccgagttcaagggcgatgatttgttcctgcggtgtggccaccatcgtcaccaagctagtcgctaggtcgctttccgcggcgtctgggtcaccgagtgactcaccagcgaccatcgctgctgtgacggctgcagcgacttgtttggggcctttgccttttggtaataaggttagtgcgcaataaacagcgttgaagagttctgctaataagccgccaccatcttcaagacaggttacggtgatagtgagtgcttcggttgccaataaggggcgtaatgtcgtttgcaaccattctaattggtgcgctgttatgccattgccattgacttgcaaggaaccttctgtaggttgaacagcagcgagcactttggtatcaccgcgttgccatagaacagaagcgggttgttgctttagaaaacgccaagtgacttgcactggccgtaaatcattatcagcacgattattcattcggaccatcgtttttttcctccttaatgataacttgttgggcttcaagggttgggattgctaaccattgacgcgcgattgcttcgaaattggttacagatccggtcgtataggtgtgtagttgcccagctgttgcatcggccaccaactgattgcgatcttgtaatgcctgaatcaaactatcaacagcggcatgcgcggggtcaaccagcgtgactgccggtccaactgtcttttgaatcgccgcggttaataatgggaagtgggtacagccgagaattagcgtatcaattcccgtcccgcttaatggcgcgagggtttcgtcaaccgtgttttgcacagtttcgccactcaattggtttgcttcaatcatcggtacaaaagttggcgcagccaaactcgtgacgtgtgtcgccggtttgagtgcctttagttgataggcatatgcgccactgttaatcgttccggtcgtggcaattaccccgacatgccgattacgggtcgttgccaatgccgcttggctacctggtgcaatcacaccgattacaggaatcgtcaattgcgcttgtaaatcaggtaaggcggccgccgttgcggtattacaggcgacaaccaatgctttaatattttgcccccgtagaaaattggtcatctgccacgcaaatttgcgcacggtttccgccggcttttcaccatatggtaggcgcgcttgatccccgataaagaccatgtcttcgttgggtagacgtttaagcgcctcttttaagagggttaggccccccacacctgaatccataaaaccaatgggttgtttttgcatattagatttctcttttcatttcaggatacactcgtaacttctattttctcttttttcggtgcaaaattcaactaaaacaacgggcacggccggcaattcacagttggcgttaatttttataaaaaataaagagttttcgcggtataataggagtacttataaaaaacgaaccataaaggagtgccactgtgactcaatcacgctatgaacaactcgcccaaaatccacaaactgcatcatatctgacacaggcaacattacgggatatcttgttaccatcaattcttagggccgaaaatgacgccatcagctattgggccggtaagcaactcgctttgcaattcccactcgattctttcgaagacctctgtgccttcttcgaacaaatcaacttcggccatctcagtcttaagaaacagaagaaggaacaatacttcttcgaattaacaggcccgattgtcgcttcacggattgcggatttcgatactcctgacttccaattagaagccggcttcgttgcccaaatcctcgaacaacaattgcggattgtgactgaagccaaagcaaccattgaaaataaaaaaaacgtaacgattttcgtccaaacagattcaaaagcaccaattgaagacgaagcagtcgaagccattcatttaacggttgatgcatcacaagtcgcatctgtaccaagtgaatcagaatctgttgaagaagaaccagcacctgtgatgacacaacctgttgaagcagcccctgaagaagtggctgctcccacactagaaccagaatccgttccagaaacaccagttgttcctgaaccggtggaaccagaaaacaagccaacttctgaagaaacaccacactacacaagaacccgcgtggcagacttaccaagtcgacgagaaatgcatagaaaacacagataagcatgtgctataaaaaaagggtaggaacaaaattaaattttgttcctactctttttgaatacttagcatattaaacgtgttaatcctcaagtgataaccggctctgtctcactctaatcaaagtcatggacgttattgccgctgacgttttgccagtcgcgacttaagaagtcgtttgacatgtcatagtgcactgcttttgcttttttcgttctcatgaatggttggagtttttgatcaactttcaaccagccacgccagccaagatgaatcgtatcttgcatgaagaattgttcattaccgtcgttagtcatatcaacaatgttgttgaagccttgcgttctcaattgatattgaatcttcttatcaaaacgattcaacatcgcttgtgagagccctgtataagcggcccaacgcgcattaacgggtggaatgatgaattgaacagatactttatgggctgcgaagtaatctaacatcaattggaaatcagcaaactcaggtgaactttcatagttaaagtgactttgttcacccttcaatttaccaacattgggtttaacccgttttttgtaaaaactattttgaatgccaaacggattatcacccgttactttttgtcctaattccgttgcgacttgatcaagttgcatgttatcaggttgttttggtaacaccttcaagcctttacgcaattcgcgttcacgaccccgaatgaataattggctgaagagttgatcttgatgttgtaacgctgggcgtttcacattattaatgtatactttttgcgtctccgttaaaggtatgcctaaagctttgttcttcaatgcatcccgcattaccccgttggttgtatcacttgtgagttctagaattcgtttcgctgcataccgcgtactttcagaatccttcgcgtggattaagaaataactggtttgtagtggtgaatagaagaaatcgaacatctcaggttttaccccttgtggtacaaaccattgtggcgaaataacgacgacggcctttttaccgttcaagtgattaccagtcgcttgaagtgataaaaagtgggtcaatgactgagtccctggtgcccctagtaggaatggcttattttgccaatcatacttgtttgccataacagatggatgtaacgcgtccattcgggatagttcggatgaaccaatcatcggaatgtagttgtcgttaaatgcagcatctttgatggcttccccttttagcacattggcggataatgacgtcgccgctgtcgacaacgtcttttcgctaggtcgtcctaatcgaagaggtgatagtaataaggctgttaagcagagaccggccactaaaaccgggccgaaaatttgccataaacgtttaaacattttattgcaattcctttacgcgagcaatgatcttgttaggtgttgaccatgcttcacgatcgaattctgaaacaggtacttcaatatctaattggccttgtaattcaagtaacatttgcacagttgccattgaatctaatgtccctgattcgaataattccatatccatatcgtctttaatatcgtcgttccctgttaaatctgctaaaatttctactactgtattttctacgtccatgattaaatcgctcctttagtgtgtaggtcttagtggaaccataaccggtccaaaaagcctgagaaaattagaaaactgagacaaacggtgttaaacgttgcaaaaattgctaagtagttcgtccaccgattgctgataatgtgatccttgtgtttcttcttgaaacgcaaccagacatcggtaaggatgatccagatggcgtggaacaagccgtaaacaatgtagtaccatgtcaacccatgccagaagcccatcaataagaagagtgttaaatagccgagattggcaatgaggaccttgttcttggtaatcttatgtttcatcaagaagaacactaagcgcatgtagatgtaatctctaaaccagaatgataatgtcatatgccatctattccagaattccttgatattggttgatgcaaatggcttgttaaagttaattggcgtttcaacacccatcacataacttgtcgcaacagcgaataaactgtagcccgcaaaatcgaagaataaatacatactgtaaacatacatgtaaccaacaagcccccatgagatatcaaggaacccaccgcgactcgccattgctaaatgcgcaactttagggagtaacacggtcccgaataagtaaccgagcataaacttatacacaaagcccaacatgaagttgtggactgccttgcccagtaagtcgagataatggtcacgatcaggaacttttaggtaatcttttttgaaacgacgataacggtcaattggtcctgatgaaatcgtcgggaaaaatagcataaattgtaagaataaccatggttcaaatttcttaatactgccatcacgggtttccataatcatcccaactgacttaaatgtcagataactgatccccaagaagccaagaattgaattactacccggatttaagaatggcacgaacttgacaatcactagcggcataatcgctaagataacagccagatcgaatagccaggtgttgttgtgcttttgacgatagacagtgtatccccaaatcagtgctccttcgaacaggacgtaaccaatcaaggcaattccctggtgaaccttatccccgtcaaagattaggatcaaaaagagcagtgagacaagtgtctcataaacatgccaacgtttgccgttaagtaagccaatcactaacggaattaacgccgcacctagaatgagaaagtagttcggattcgcgtacggttgtaaattaggcattgccattaacctctttaatcaacgctttacgatcaatcttcccattgacggataatggtaatttttcttgataaacaaatcgttgcggaatcatgtagtccatcgtattttcagcgagttctgcttttaacgtcttcgttaaatcattgcccgcttcttgaccgtctgctggcacaacataggcaatcaattgggtgacttgatgggctttgttgtagcgcggtacggtacatgcttgatgaacggctgctaattggcttaagtggtggtcgatttcctctagttcaatccggtaaccgtgcatcttaacttggaagtcggtccgccctttataaaagagcaagccatcttcgttttgggtgaccaaatcgcctgaatggtagaagcgttgcccgtctttttcgaagaaggctgcagctgttttttcaggattattcaagtacccttttgaaacacttgggccactgattaagagttcaccaggttgaccaactgcgactggattattttgttcgtccactacgacagtttgagtatcagcctttgtgtagccgattgggagtcggtcgtaagtcgctaagacctccgccgtaatttcgatgctcgtcatcgcaacggtcgcttcagttgggccgtatgtgttgaagatttgcgcatcaccgaaacgttcgattaacttcgttgctgtttgatgcgttaattcttccccacagaagacgaattgttttaattctgggaaatgttcactatcaaatgttggtgataataagcagatttctgcaaaagatggtgttgaaacccattcgttcaccttaagagttggcaagacttcaaataacgtcttgaagttgtccgtcacagctttttctaaaacgacgagggttgcacctgagcataacccgggaaataaatccatgactgataaatcgaatgagtatggggcctgaattagaacgcggctgttatccgcaacgttgaaagctgggttggcccagtcaacgaaactttgtaaattgctttcgctgatttggacgcctttaggtaaccctgttgtccctgacgtgaagatgatgtagaaattctcattcccttgcacactttggctagcatcataatcggttgctccgtttgcaatcacatctgtcaattgggtttctgcgaaaacgggcatattaacatcaatcgctgtttcaccagcccatgataggacagtagccggcgttgcgactgattcaatctgtttaatccgcgctggatctgaatgttgttccaccggaatataagcatggcctgctttaacagcacctagaaaagttgctaccatctcgaagttttgaccaccgaagataatcaccggtgctttagctggcaagtcttggctttgaatgaaatgagcaatccggtctgaagcagcctttaagtcggcgtaagtgtgttgcgtcgtgcctaattgataagccacagtttgtggttggtcaattgcaatcgcatcaatttgttgaatgatattctttttcattttaacgacgctccttcattagaattcattgtagataaatttaggactaccgataccactgtaatcatataaataaagtagaattagcagaataacaaaataaattatggttttgccaatgaaattgacggccggtttattccaaaaattaagtattttttgacccattttttcaccatctctttctctctctttttgattttcatcattttgttcatcattaaagttaccacaacgtttattaaacaaccactaacatttttgtcacacgctgtcacataaaaaaagcacctactaaatagtaggtgttttcataattagtcggtatattgtgccaaaatcgtttctagttgttccttattatggaagccagtaattttttcaacaacttgaccatcttttttaaccactaacgttggaatcgccataattccgaaattagcaggcgtttctggattagcatccacatccattttactgaacttaactttgtcgttagtttctgccaatgattcgataacaggtgattgcatccgacaaggaccacaccaagttgcccagaagtctgtcaagacaacgccactctttgtttcttcttcgtaatttttatctgttaatacttcaaccattattcttcgccctccattcaattgtacaaaacatattatttatcatgatactcctatatggcgtaaataacaacttaactcgcttattattcgttacaaacggattattttatccccgtttaatttaacaagcctaaaaaacacccccaatcaaaaccagaaaggactggttggattgggggcgtaaacgtgctccagcaggcaaactcctccggttagctacaccagccaaacgaccaacaagttggtcattcgtctgcctatgctaatcctcggcgtataaccgcctgcttccgcactctatttgaatgttacgattgttgcgccattgccgcctgcgtttgctggggcgtattcgtatttcttgacttggcgattgccttttaggtagtcctggacaccttggcggattgcaccggtccctttcccatggacgattgtcacttgttggtagttcgctaacaaggccgcatcgacatattgatcaacttcagccattgcttcttcgtagcgtttgccccgcaaatcaagttgggctttaacataccgcgctccaccgctgttgacagttgtcacatgccgttgaggtcggttatcttcaacgactttttgtttctcaaggtcttcgttagcaatcttcatcttgataatgcccatttgaacttcccagttcttggcatcgatttgccggactaatgtcccacgttgaccgtatgaagtaactaaaacatcatcgccttctttaagggtttgacgtcgttttgcccgttgcaatactttgtttttcttcaaggttgtttcttggtgcaattgccctaattccgacttcgcatcgattaattgattttccttaatctgggcgccttgattcatctgcatatcccgcaacttggtaatcactttgtctgctttaacttcagctttttcgacgatcgcattcgctttttctttcgccttcgtcatttctgtttcacggtcttcgaagaattgttgataagcagttgataactgttgatgcaagtcagtcgcttctgctaattcatgccgcaaagcttggtattccgtttcggctgccttacgttgattttcgagatcggtaatcatattatttaaatcttggctttcatcgttcatcaattgtttagcttgttgaacgattgagcttggtaaccctaagcgcgttgaaatatcgaacgcgttactacgaccaggcaccccaattaataaacggtacgttggttgtaaggtagccacatcgaattccatgctagcattaatcgtttgtggccgattgtaaccgtaaattttcaattctggataatgggttgaggcaacgacatcagcgccaacaatcccaatttgatccaagatagcgatggctaaagcggccccttcttgtggatcagtccctgcccccaattcatcgagcaagaccaaactacgatcgtcgatatgttggagaatctgaatgatgttttccatatgtgctgagaacgtactcaagttctgttcaattgattgttcatcaccaatatcagcaaaaatatccgagaagacgccgacttggctctcttcacgcgcagtgataaataagccagattgggccatcacttggactaagcccaatgttttcaacgtgatggttttcccaccggtattgggacccgtaacaacgatggcctgataatccgccccaatcgcgatgtcattagcaacgactttagctgggtcgattaatgggtgccgtgcttgtttgagttcaacatggttttctaaattaatcagcggttcagtggccttcaacgctttagcaagttgagccttagcattgacaaaatcgagctgccccaataattcagcgttggctaaaatattgtggcgttctggcatgatggcttccgataattccgccaaaatccgttcaatttcttgttgttcttcaatttgtaattggcgcaagcggttattcaattccatgatggcttgtggttccatgaaaagggtctgaccactagcactctgatcatgcacaacgccgccgaattggccacggtattcttgtttaacaggaatgacatagcggtcatttcgaatcgtgacaatcggatcactcagatatttagctttagcaccgtgtgtataacttgccatccgcgatctgatttggccttccaattgttttaaaccagtccgtaagccacgcaacttggttgaagccgtgtctaaaacggcgccatcatcagcaacagaacttctaatcttttcagttagttgcggtaaagtcaccaattgggcaactaagtctggcaacgcctttaaggttaattcatctttttctaagtcatcaaagaaacgcacaaccgcagaagtcgcacgtaaaacccgcccaacttgcgcgagttcggtaccgtttaaagtcgcaccgatttcgattcgtttcaggtgcggacgaatattatctaactgtggcaaaggaatgccaccttttagccgttcaatatcgaccccatctttggtctggtccaagcgttcttgaatcaattccgcatcgttagcgggggttaattgtgtgatttgttcttgaccaaacgccgtgatggcatggccttgaagcatttgtttaattttatcgtattctagtgtttgtaatattttatgattcatttaagttagctccttctaaaaaaggggcgacttccgtcagccccaactgcactatccattttagccagcaatccaccagctcgtcacttgagaggtgaggactggtgtgtgtaagacaatgacgcgcgcaactgtcgagttttccaatgtcttctgtaagccatcgactggcactaaagccagcacgtagaggagcaaaaagagccccacgtaaacgaccaagaaactcaaaagtccaccggctgccttgttaaattgcttcaaacctggcatataagtcaatgaattcaacaatagtccgatgaagcgcaccaacaagccaccgataaacatcacgaggacaaaggcgacgccgatataaaacgcatcatcgagtgacaacccgatactcttttggaaaaatgcaaaatagctgtcttcagttgccgatgggtatggcaccattaaacttagcttaggccctagtgtttggctcatcgctttggcaatccaaaagacgataaagtagccaatcgtgtagacggcttgcatgataaacccccgtctgacccctgtgtaaatggcatataacagcattaagataataattagacttaacatgagttccccttagatacgcgttttgtggcgtggatgtgtgtatgattgattggataaagtattctgaaacgtgctccataagccatcttcttccggttagctacgcctcgcaaacaatcgacttcgtcgcttattcacgagtctatgctaatcctcagaagatacccagcttattgcgcactctgatttttgaaacgtgctcttgcaggcatatttctgcgcttaaccaaatttgccaaatcggcgattgcatcgccaattcgtcaaatccagttaatactcaaaatataaccgcctgctgtcgcactctttttttaacgtgctcctgcagatatactcttccggttagtttcataccgcaaacgatcggccttgccggtcattcacggtatgctactaatcctcagagtatgaccatctgcagtcgcactctaattttatttgctagttcaactgaactattttatcatgaaataagggaaagtggcaattttactccgaatctcttcatttgccactcattaaggagccaatcgtatgcaagcagtcattaaagtgacaccctcacaattaactactattcaaaaaaattatccgaccaaccgtcaactaccgccgggggccgtttttgcgcaccaagccaatggactaagcattaccggctataaatctggcaaagtacttttccaaggcgctagtgccgaacgagaagctgctaagtggggcaccgctacccctagcaaagcaaaatctgctagccgtactaagcctaaagccgccaaaggcgatgttttaccagctgattttgccaaatggtccgttttaggctcagatgaagttggtaacggaagctacttcggtccgctgaccatcgccgccgtctatgtcagccaagaaaatctggcgttcgtcaatagcctaggcgtcgcggattccaaaacgctaaccgatgcacaaatcgatcagatggcaatcaagatgatggctaaactcccctatcacatcgtcaacatcatgccaccgaaatacaatgaagtacacgccacaatgaacatcgaaaaaatgaaggccatcagccataatttcgcactcctcaaagtcctccaaaaaatccaacccgaaaaacccgctggcatcctcattgatcaattcgaaccacgcggcatttactacaactatttgaagaatgaaccggttgttttacgcgagaacgtttatttctcaaccaaggcggaacaatttcacctcgccgttgctgccgcttcaatcattgcgcgccaccaagccaacctatcaatgcttgaactgtctaaaaaagcgggccgccaaattccgctcggcaatcatcaagcagttaaccaaatcgccgcagatttactcgcacaaggtggcatcgattacctaggcgaattcgctaaattgcattttattaacacggaaaaagcgaagaaattgttatagagtgcgactacaggcggtgatattttgagcattaactggatttgacgaattggcgatgtaatcgctgatttggcaaatttagttaagcgcagaaatatgcctgtaagagcacgtttaaagtgcgtttaaagcgggttgactctgagcattagcacagtgttgtggatgaccgacaaagtcggtcgtttgcgatacgaagctaagcacaagagtcagctttaaaaagcacatttcaacccacaccttctccacataaaaaaagggtcccgactgcaatttaattaattgctatcgggaccctttttgaaatagatggtgataacgtgctttcatcaacaacttcctgtgctttgctacacttatcaaatcggcgattgcatcgccaattcgctaagttaggcaaatgctcagaagttccccgttgatgacgctcttcttttctttaacgtacttttcaaaccatacttctgcggctagctacgtcccgcaaacgatcgacttcgtcgctcattcacgggactatgctagtcctcaaagtataaccggtttgaacgcacttatttcatgttgtcgtctgccaaaaatgtgtttagtacttcttcaaccatttcccattcttcgtcgtcttcgattgggaataggtcacctttgctggcatcgcctgcatcgtctgatgtgaatgagaaagcttggatatcaacttcttcatcttcttcagcgcttgttgggtacaatagcacgtatgatttaccgtaatcttctgaatcaaatgtaaagagcacttggtataattcctcgttaccttggtcgtcgattagtgtaatttgttgttcttcatcttggtggatgttcttgttatcttcagtcattcatcaaaactccttaattgttttatttattagccttgtgttaagcgaccgtgcgcgtccaagtagttctgcaaaatcatcaccgcagcaagcttatcaatcacttgcttccgtttcttacgtgacgtatctgcttgttccactaacatgcgttcagcctgaaccgttgttaggcgttcatcgatgtaatcaaccggaatctctgggaaaagttcactcagcattgccccgtattcttgcgctttaagcgcccgtggcccaatcgaattattcatattcttgggtaaccccaaaacaaaaccagtcacttgatgttctgcaaccaattccttgacgcggtctaacccaaattctgattcatcttcattgatgcgaataatctcgaccccttgagctgtccagcccaatagatcactaatcgcaatgccaaccgttcttgatcctacatcaaatcccattaagcgcattatttcgtcgtttccttatccaaataatttttaactaattcctcgataatctcatcacgttcgtgcttgcgaattaaattacgagcatcattatagcgcggaatgtatgctggatcaccggacaacagataacctacaatctgattaattgggttgtagcccttctcttctaatgtctgatagaccgtcgttaatgtttcatgaacattcttggggctatttttaccaaaatcaaaatggactgttttatctagattcatctctcaacacctcaacttttcgctacttatacaaccatattctactcgaaaacaggacaaagtacaactctcccctctcttagcagaatgcggatgagagataactataacacatttcgctaaattgattaacaaaaagaacaaaaaaataacgggattgcaatcaataaaaaattgacgacaatcccgttataagttaagcgttcgctaaagctgttttagcagctgccaaagcatctgcgatcccagctggattcttcccaccagcttgggccatgtctggacggccaccaccgccaccaccaacgagtggtgcgatttgtttaatcaaatcaccggctttaatccccgctttaatcgcatcaggtgcgaccgcgacaatcaagctaaccttatctcccgcaactgttgcgagcactaagacatctgaaatttgtttttgttgccattgatccgctaattgtcgtaattcgttcattccggcaacttttgcatcagcagccactaagcgccattgaccaactgtttcgacattttcaaaaacattgccagcttgttgttgggcaaattttgctttgagttgttcgttttctttttgttctgcttttaagtcagattgtaattgttgaatcttcttaggtaaatccttggtttgagcaactttcaattcaccagctaattcatttaataaggcttgtttgtcattcaaatacttgaaggctgcctttgaagtcacggcttcaatccggcgcgtcccggcaccaatcccagattcgctcgtaatcttgaatagaccaagatcagcagtgttagcagcatgcgtcccaccacaaagttccattgagtaatcaccgatttgaaccactcggactgtcttaccatatttttcggtaaagagtgcgatggcccccatttgtttagctgtttcaatatcggtttcaacagtattcacaggtagtgcagcccaaattttttcgttcacaattttttccacagtggctaattgatctggtgtgacttgaccgaggttcgtaaaatcaaaccgtaagtagtcaggttcaaccaatgaaccagcttgatgcgtatgttcgcctaaaacatcacgcaaggcttgatccaataaatgcgttgcggtgtgattcttaatgacgccaccgcggaaggttggatcaactgataagacatagtggacaccactaatcatttcttcgagcacttcaacggtgtgtaatggttgcccgtttggtgcgtattgcacgtcagtcactttagcgactacttgcccagctaggttcttaatgatcccttgatcagcaacttggccccccatttcagcatagaatggtgtttggtcgaagattaattgcgccgtaccactcttaatcgtttgttgttcggcattatcttgtaagatgacgcttaacttactttctgtttcaagcgttgtataaccagtgaaggtactttccactttgatatccattaaaagttcgttttgcatccccattgattgttcatcactacgggcattacgtgcacgtgatttttgttgtgccatttcactttcgaaaccagcttgatcaaccgttaagccttcatcttcggcatattcagttgtcaattcgattgggaaaccatacgtatcaaataacttgaaagcatctgccccagcaatttcactttgaccagcagctttgacactgtcaatcgtttggttcaataaacgtaaaccatcattcaaggtttcacggaaacgatcttcttcagaacggatgactttttcgatgaattctttttgtgctaatacgtctgggtaatagctttgcatgatttcaccaacgattggtactaacttgtacatgaaagcgtcgttgatgccgagtttcttaccatttaagatggcccgacgaattaaacggcggagtacatagccgcgaccttcattggccggcattgcaccgtcaccaattgcaaacgtcacagcccgcgcatgatctgcgataatcttgaatgaaatatcatcagctgcattttgaccgtattgtttgtggtcactcatcttagctgtcgcttcgatcaatggcatgaataaatctgtttcaaagttggttggggcttcttgaatcactgaaacaagtcgttcgaggcccatccccgtatcaatgttcttgtggggttgttcaacatattcgccgtttggtaaatggttgaattctgagaacacgatgttccaaacttccagataacgttcgttttcgccaccaggatagttttcaggattatcttcgctaacgttgttgaagctttgaccacgatcgtagaaaatttctgaatcggggccacaggggccttcaccgatatcccagaaattatcttcaacttcaatgatgtgtgattctggcaaaccgactttttcatgccaaatccggtgcgcatcttgatctttaggataaaccgtcacgtataatttttcaggatcgaaaccaatccacttgtcgctggttaagaattcccaagcccatggaatcgcatcttctttgaaatagtccccgacagaaaagttgccgagcatttcgaagaaagtatggtgacgagcagtcttcccaacattttcaatatcgttggtccgaatactcttttgtgcattggtaatccgtggattattaggtacaacgcgaccatcgaaatacttctttagggtcgcaacccctgagttaatccataataatgtcggatcatcatctgggacaagcgatgcacttggttcgacatcatgacccttttctttaaagaaatctaagaacatttggcgcacttgcgcactggttagttttttcatcatgtttgctccttcaaaaaaataaaacaccgctgcaatttcaaggacgcaaaagcgcggtaccaccttgattgcaacgatgttagtcgttaacctctttatgagtttattgaattgtttgtgatgttggggagcacgtcaaccaatggcggcaccttctctcagtctagaaaggcgttcctgtctccgtcagttcgttgcgtatatcccaacacttccaaagtataaaaaagatttgctgaattgtcaactaatccaaggtaacggtaatcgcaggccgatagtagcactgaagcgtcggattgcccaatgccgccgtttgaatcccagattcataggcgggtgcttcaggcaaccattgttccaaactataccgtccccctgtcacacaagcaccacccttataaacaagtggatcttgagtaagttcataaccgtcagcggctgttgcttgtaacccaaatggcatctgctggcgctgagtcggtcgtggtaagtgattaccacttaaccacaacgtcttactccctgcacctttaagccattcatactgatcaacactcaccagatcaaaaccgcgccgccgcaatgtctggcgtagttcactttcgtcaccattagttttttcaaacacttggtaacaatctggtcgcccacccgcttgtaaaattaggtgcgcactttcaagtgtttcagctgaattttgttcccgccgcgcccgaaacaaggtattttggatttccgccaaaaactgacgcccaactagttggtttccattaaaacgtcctgttgtcgtttcatactcgccttggagtacccactcacttgaaattggtgtttgtgccactaacatcggtgccatattaacaatccgatattctgatgtcatctgatcaacgtattgatcgacatccgcttgcgtcgcccaaacgagtccttgatcaactggtaacgtacgtttagtttgtgcaaaccactcactcggtgctaagtgggctacccctgcttgccatcccaactgcacattagcttggccggggataaaaataaactgctgcccagctagccgggcactgtaagtttgaaatacttgagtgccaatcgttgcggtctcactctgaatcgcttcaattggaatcagcgggctaacaaagtagcgcaacacctggccaaaattagcgcgccgtgcttcttcggataacgataaccagttcagtaattgtaagtcattttcatgcatcacagccacctcgattatgaattaactagctattttgcttcttgttttgacgtttcttttcacgtaattcaagtcgttgttcaatccggcgtttcttttgtgcatcttgtttaatggctgctttaatctttttcttataaccgggtttgcgtttaagtttggcctttttgaccatccctttcatgccgacatctaattcatgcgtggtagctacccgttttttacgacggttccgatcatatgatgtgaccaattcgccatctttaaatgtctttggtgtgaacttgatgcccattgcttcaatttgtgcaacggcttgttcatcatctggaccataaagcgtaatcgcggttcctttaagaccattccgaccagtccgaccaacccggtgaatgaagaattctaaatcttcacgtgggacttcagcattaatgaccatgctaatcccttcgatatcaataccgcgggccgctaaatcagttgccacaacatattgatagtctaagttatgaatttctttcataatccgtttacgttggcgtggtggaatatcgccatgaattttagcgactttcaagccttgtgattgtaaataacggtggatgtcatcaaccttgctcttcgtattagcgaaaaccaagaccatgaaaggatggcccatcgtcaataatgaataaatggtttggttgagggctttccccttcgttggcactaaccagttgtcgattgttgggctaatcacagtttcgtttttaacttcttcaatcacaggattgtgcatgtatttttgtaagaagggttgtaacttatcaggaatggttgctgagaagaccatcatttgtaagtcttctggcaaacgactagcgatgtcatcaactggcttcaaaaagcccatgtcaagtgtcatatccgcttcatcgatgaccaagatcttcgctgtataaatcttaagcgccttgctcttgattaaatctaaaattcgaccaggagtcccaatcacaatctgtggttgatgttgttcgagtttttcgatttggcgttgcttgtcagtcccaccaacataacgaccaatccgaatatcccccgtcatgtgttgagtgattaattcggcagccgtatagatttggtaagccaattcgcgacttggggctgtgatgacgatttgaacttcgtctttttcaggcaccagtttatttaaaaggggtaataagaacgcgtgggttttcccactccccgtttgtgattgaccgataacacttttaccagcgttgatggctggaatcacacgccgttgaaccgccgtgggttttgtaaagtgcatgtcgtctaaagccgcaatgatttcgggttttagattaaattgtgtaaattgattatccataaagtcctgctttctattgtttgaatccggtaaatctggatctgcatctattcagtgtactgcgcggctagcgctgataattctgcaataattatgtcgatttcagcttgatcagctgccttagcgccactagcgagtggatgaccaccgccatcatgttgcttcgctagttcattaatgattgggccctttgagcggaaatgcacgcggtaagtgtcatctgcttgttgcacgaagatgacccacgttaatacccctttcaaacgaccgggtgttccaacaatcgagtgtacttgttgcggttcaacatgtaaccggtcctgggttgcgcgatcaaccactaagtaggcgacttgttggtcgttcacttgaagttgatcgaataagtacccttgtaatttggcttgttccaacgtgatttcgttcatcttttgattgagcttatcatggtgaatatcaaacgtcatcatttgggcggcacattccatggtatgtggactggttgaattaaacatgaagcgccccgtatcaccaacaatcccggcatataaaacacgcgcagctgcttgattgaattgtaagtggccttcgctgttattgacgatgtcaataatgatttctgaggtacttgaggcatcaggtaagacccagtttaaatccccataaggatcatcgttgggatgatgatcaattttgattaattcagcgcctaagttaaacgtctcaccactaatccgaggtgagttggctgtatcagtcacaatcactaatgcaccttgataagcagccggttcaatttcttgaacgtttgcgagccatgccaagttaccggtgtcgctcccgacttggtaaatcgtcttgtctgggtagctgttacgcagtacttcagctaagccaacttgtgagccaatcgcatcaggatcaggattgacatgacgatggatgataatcgtatcgtaagtttcaattttagcaataatttgttctggagttgtcatttattaacctctttctaagagttgaccagtgacgagggccttagccacaatcacatgattggcgtaaacatcgacatcgattttagctgaacgccgtccaatttcgagcaagcgtggtaaaatctgaatctgcgtgtcgatttgaatcaaccgtaaataatggaggttgatctgttcaatcattgaatagcgctgatgttgcgtctggagcatttgttgacaagctgccgaaaccgcttcggtcagtacaccaaacgaaattgtccctaagttattcgtcatctggggcgtcacttcatattcatatgccgccgtataaaagtctgggacagtttcactaggacgcagtggttcgacaatctgatcataaaacgtctcggcgacttgcggttggcgttgcgccgtttgcatgttgctcatgacatcttgccgggtaattaacccttctagttctaaattgtccgccaccactggcatcacttctaaactattccaagtcattgaatggccgacactggcaacactcatgtattttttaacgctcgcgggttccttggtcatgactttatccaaggtcatcgtggccggtttatctaaaatatccttcaccgtcacaatcccaacgaggcgcatatgttcgttgacgactggaaaacgcgattgttttaccgccgcactcaattgcttgtagtcggctaccgtttgattagcatgtaacgtgtggatttcagcaagtgggtggtagatatcagccaccgttatgatttcttttttaatcaattgatcggtcaacgcccgattaatcaatgccgccaccgaataggtatcgtaggcagtttgcaaaatcggtaaagccaagtcgttggccaatgcaatgacgtccgccgaagtgccaaaaccgccggtaatcaaaacagcggccccgttttcaagtgctaagcgttgcacatccgtccgatcaccaacaatcatcaatgactttggcgtaatgtagcgcgtgatggcatcgatttgcatcgcgccaatcacaaatttgtccaacaacttgtctaaaccagcgcggccaccaaggacctcgccgtcaatcacttgaacgatttcttcaaaggtcagattttcaatcttcccctttaacttctgttcaatgcggatggtaccgacccgttcaattgtgctgaccaggccgttattttctgccgctttaattgcgcgataagccgttccttcacttaccgagagtgttttggcaattgagcgcaccgaaatcttgtcaccaattggtaaattttcgatgtacattaaaatttgatcatgcttagttgccactcaacgccaccaccctttatcagatttacatagttattaatagtatatcggttttagcgcacaaaaacaaaggaaactcaactattcacgctcccaatcgtataacggtaacgtgatgttttcaaatgtttgcggtgccaagttagtcaccgtaatcccgagcaagcgcacgccatcttctgcatggccgatggtttgccaaatttcccaagcgatcgcctcgagttcagctgccttgccgacatattcgttaaatgttttacgcttagtaatagtttcaaattggcgattccgcacttttaaaacaactgtcaaaccgtgtttttgattcttgcgtaaacgccgttcaagttcaatcgctaacttcttcaactcaacttgcacctgctcttcactgattaggggttgcccgtaagtattctcattgccaattgatttgcgttcacgttggtaggcgaccgggcgattatcgatgccgcgcacgtgccgatataagccgtagccaagcttgccgaaattttgcatcagcatcatttctgattgttcaagcaagtccgcccccgttaaaatcccgagttcttgcattcgcggcgccgttttcttaccgaccccacggaatttttcaattggcaagcgacttaaaaaggcaatcgcttgttccggcaaaacgagtgtccgccccgctggcttgcggtaatccgatgccatctttgctaaaaatttattgtacgaaatccccgccgagctgacgagttgggtttctttaaggatttctttttgaatgtaggcgaccacatcaattgtgtgtgccaagccgagtttattttccgtgacatcaaggtacgcttcatcaaaagcaatcggttcaatcttatcggttaccgtatgaaaaatcgtgtgaatctgttccgagaccgattgataaagcggaaaattgggcgccttaaaaacggcttggtgattcggaatcagttcagctgctttttgcgcactcatcgccgagtgcacaccgtattgtcgggcaacatagttcgcggtcgtcacgacccctttgccaccagtatcactcggattacgggcaatcacgaggggcttttggcgtaagtcgggctgttcacgctcttcaatcgatgcgtaaaacgcgtccatatcaatgtgaatgattttgcgactcgtatcattttctaatggaatcttgaacagctctgccatgttacccctccttaattttttcaacatgctttttcaggcacattgttccgcttttgacgcacttctttctttaacgtgcttttaattcgtaaccttctgtgctttgctacatcagccaaataatcgcccttggcgcttatccgtctgattaggcaaatgctcaaaggctaaccgcgaattaacgcacttcttcctttaacgtgcttttatcaacaacttcttccgctttacctcacttgccaaatcggcgattccgtcgccaattcgtcaagtgctgtaaatgctcagaagttacccgttgatgacgtacttctttcaataagaaaagcctggcatgagcatctcatacacagactttgctgacttgtttaatttaattattttgagtgggatcaaaaatccattcggcccctgttgttgccagtaaatctgttgcttctttaggccccattgaaccgattgagtaacctggtagtggcgtttgatccgcatcccagacttcacgaatcgcatcgacaaattgccatgaagcggctaattcatgccaatgtgtgaagttcgtgccatccccattgagcgcttctaaaatcaaacgttcataagcttctggactgtcagccaacatctgttcatcatattggtaagccaattgatcaggtttcaaggcgaatccttgaccgacttctttaccattaatcgttaatgaaaagccttgttccggttcgacatagattgttaagacatcaggtgccattgctgaacgatctgacttatcatcagcaaaaatattgacgccagtcttcttgaagacgatattgatttgcgtttctttacgtgccaatcgtttaccggtccggacgtaaaatggtacgccacaccaccgttcgttatcaatcatcactttcccagcgacaaatgtttcggtttgtgaatcaggcgcaacgttggtttcttgttgataccccggtttgttttcgccatccaccgatgtttcagcatattgggcgcgcacaaagttttgtttgatttctgctggtgagtaaggttgaatacttctgaaaagacgtgttttttcacgttgcacatcttctgccgtaaagttaaccggcacttccattgcaagcattccgatcacttgcatgatatggttttggaacatatcgcgcaaggcccccgatgtttcgtaatagccagcgcgttcttcaacccctactgattcagccaacgtaatttggacgttatcaatgaattgattattccatacaccactcaatagaccgttcccaaaacgcaaagcaacgatattttgaatcatctctttaccaaggtagtgatcaatccggtagatttggtcttcatcaaaggtttgcgtcaattcttggttaagcgccttagcactttcataatcgcgaccaaatggtttttcgataatcaaccggttaaagccatccgccgttaggagcgcttctgatccgagatgacttgcgattgtcccgaagaaccgtggtgacatggccatgtaataaatccgattttggtgtaattcgtattgttcatccaactgacttgctaaagcctttaatgtttcgtagtgcttggcgtccgtcacatcatgtgattgataatagaaatgacctacgaaagcttctttagttgcttgatcttcatcaaagttgtccaaagctgtcatgacgatttcgtgataatgatcatccgtccatggccgccgtgctgttccaatgacagcgaagtgttcttttaaataacccttccggtataaattaaataatgcggggtataatttccgttgggctaagtccccggaaccaccaaaaataataaagagtgctgctaaatctgtgtgcatatctcacaccactttcatataaattaattttgtggcgtcacaaagatgtgttgtgccgctttgaggccgatttggatttctgtttgactcgtattattaaaaacagtcaacggactttcgaagaggccaaccttttggagcgtcacactgtcaccgactgacaagccgatttccagtgtatattttaataagtcattatcatccaatacgcgatcgataatcgccgtttcacccacttgtaatgtttcaagtgcgatgtgactttgttgttcgaattcccccttggcattgggtataatcccaccatgcgggcaacgcgttggatgccccaagaaatcagctaaccgttcagccaagtcgtgattagtaacatgttcgagttgttctgcttctgggtgcaccgtattgaattgataatgtaacttgtcgactaaaaaaacttcccataaccgatgattgcgcactaatagggctgcttcgcgggcgccttcacttgttagttgaattccttggtaaggtgtgtggttgacgtagttttccttcactaacttattgaccatttccgtgactgatgccgccgaaacgttcaatcccgctagtatttccttattggtaactttctttgcgtcgccaccaagttcaaaaataatttttaaatagtcttctttattgggtgtcattgccatccagatccttaatcaagtttgtcgacaaacttttcttagttatccctgaactaaatgaatgtctactttctattatgccttatttgtaataattttcataccattaagcttcaatttaatcccttaaatagtaaaaaattaatctcttttcagcaacaaaaaaaggcggtagaccgatttgtttcagtctaccgccttaaatttgtggtcgggcttctcaaaccacttattctagcaaatcacttggtcaatttgctagaattctgcttcgagaatccctttcaattctttaattaatggttcttttggattggttaccgtacagttatcttcatatgccagttctgctaaatcatcaacgtggcgatcaaagtcggcctttgtcacgccattatcacgtaaacgcatcttgatgccgatactttccgccaatgcagtcacagcatctgcgtaagcggccaccagttcttcagtcgttttacctggtaaaccgagataacgtgcaatttcagcataatcttcatctgctctgaagtaactgtatttagcccagagtgcccgtttcgttggtgtcttagcattatagcgaatgacatgcggcattgtaatggcaatcatcaatccgtgcggcaaattgaacgcgccgcccagtttgtgcgccagtgaatggttgatacctaatagcgcattggcaaacgccattcccgccattgttgacgcatcatgcatattggctttagctgtcttatcgcccgcataactcgcttgtaagttatcaaacactaatttaatggcttgcaaactgagcccttttgtataatttgacgccatcgctgatacgtaactttcagtcgcgtggcataaaacgtccatcccagtatgcgcaaccacgcggggtggcacactttcgatgaattgactatccacaattgccacatctggtgttaacgcataatctgccaatggatatttgatgtgcgtttcactatcagtaatgaccgcaaacggcgttacttcagaacccgttccagaagtggttgggatacagattagtttcgtccgatcgaggtttgggaacttgtaagtccgtttccgaatatctaagaatttttgcttagcgccaaagaagtcggcatcttctgaatcatagaataaccacatccctttggccgcatccatgactgagcccccaccaatagcaacaattgtatcgggtttgaagcgtttcatcacttcggcgcctttataaatggtatcggttgatggatctggctcgacatcggcaaatacttggacctgcacttgatctgtgcggcgcgccaagacgtcttcaacaatttgcacgtaacctaagtcgaccatcccttgatcagcgacgataaaaaccttatgcaagtccgccattttttctaaatagttgactgaatttttttcaaaatagattttgctgggcaacttcacccattgcatgttattccggcgcttggttagcgtcttcacgttcaacaaatcgatcgttgaaacgttgtgggagattgagttatggccgtatgacccacagcctaaggttaatgatggtaacatgtcattgtataaatcaccaatcccaccttgtgctgatggtgtattcactaagacccggcatgctttcatccgttttgcaaattcgagtggtaaagcttcatccgttgtatgcaacgaagccgtatgcccaagaccaccaagatctagcattgcttcacagagttgcaagccatcttcgcgatctttagctttaatcatcgcaagtacgggtgataatttttcatgtgagagtggatattggtgtccaacacctttaatttcagcaattaaaactggcgtatcttctggaatatcgatcccagctagtttggcaattttagcagcagattggcctggaattgaaggtcggaccgcattcttatctgggtcgattactgcgtcattgagtgctgataattcgcttggtttagcgaagtaaaccccttgtgcttggaattccttcttcactgccgtataaatttcagcatcaacaattacggcttgttcagaagcacaaatcatcccgttatcaaatgatttcgagaggattaaatcattgacggcttgtttgatgttcgccgaagcttcgatatacgctggcgcattcccagccccaacccccagtgcgggtttaccagttgaataagcggctttcaccatcccaggaccaccagttgctaaaacagttgcgaccccttcatggttcattaaagcctgggtagctgcaatacttggttcttcgatatataagagtgcatctgctggcataccggctttaaccgctgcagctttaatgacattcaatgcttcagccgaacaacgttgcgcactaggatggaaagcaaagatgattggattccgcgttttaatcgcgatctcagctttaaaaatcgtcgtcgaggttggattcgtgactggtgttacaccagcaatgacaccaacgggttctgcaatcttagtgatgccatgttctggatcttcttcaatcacaccaactgttttattgtctttaatcgcattccaaatttcctcggttgcaaaaatattcttgatggctttatcttcataaatcccacggccagtttcttcaaccgccatcttagcgagtgccatatgttggtctaacccagcaatcgccatttgatggacaatattatcaatcttggcttgatcgaatgtttccaaaattgctaatgcccgttgtgcacgcgtcactaaatcggtgaccatttcattcactgtgttttcaaccgtttcaactgctgctttcttaaccatatcgattccctccatgccaattaactattgtgatttatttaacaaagttagtttagcgcattttgagttgtttgtaaactgttttgtgattataattacaaattttatttcttagttaaaggcgatttatcttttaaaagcctacatttgataataaatttactatataatgcaaataaaaaagcgctcggttgaagtattcaatcgagcgctctctgaattattttgtatcttcttttgtttcttcaaccgtttcttcttcaaccactgttgcggcttctgaagcagttggtgttactgtccggattgcgctcaagttaaacttgaggtaaacgccgtcacaatctaagacaacgattttagtatctgtattaacagaatcaatcacaccgtgtaaaccaccgattgtgatgactgcgtcgccttttttcatttggttcaccatttcttggtgtttttgttgttgtttcttttgtgggcgcattaccatgaaatacatcattgccatcattaaaattaagataacgaagaaactgggattaaaaccgccggcacctaacacaaagtttgccatttaaaaaacctcttttcaattttgtctattactaactctatcagacttatcaagcaacttccagtgattcactagaaattccgagtgttcttttcattgtaaccatattcttcgaagaacgcttctctgaattccaataaattatcttgttcgatggcatcttgcacttgatgcatcaaattaatcaagaagtataagttatggtaactcgtcaaatgaatcccaaacgtttcgtccgctttaatcaagtgccgaatgtaagcgcgggtgtagttcttgcagacataacaatcacacttaggatccaatgggcggaagtcttctgagtacttcgcattcttaaccactaatcggccttgtgaggtcatcgttgtcccattacgggcaatccgggttggcaacacgcaatcgaacatatcgacaccgcgaatcacaccatcgattaaggcatcaggcgaaccgacgcccatcaagtaccgtggtttgtcttcaggtaacattggtgttgtgaaatcaagcacgcgattcatttcgccttttgattcaccaactgataagccaccgattgaataaccggggaagtccatcccaactaaatcgcgcgcactttggcggcgtaagtcttcaaagccggccccttggacaatcccaaatagaccttgcgttgctgggttttgatgcgcaatcaagccccgttcagcccaacgtgatgtccgttcaactgattttttaacgtagtcataactttcaaagaatggtggacattcatcgaaactcatcatgatatcggcacccaaagcattttcgacttggattgctttttccggtgataagaacagtttttcgccgctcaaatgactcttgaaagcaaccccttcttcactgatatcccgtaatttcgcaagtgagaacacttggaaaccaccagaatcggttaacacaccacggtcccagttcatgaacttatgaagaccaccggctttttcaacgatgtcttccccaggtcgtaaccagagatgataggtgttcgataaaataatgccggcacccatttcttttaattcttcaggcgctatggtcttaacactggcttgggtcccaacaggcataaacatgggtgttttaaacgtgccatgtggtgtcacaatttcaccaaggcgcgccccggtatgtttttctttcttgattagacgatacttgatcgctggttccatttaatcgactccaattctaggattattgttggttcagtaataattggtacgcatagcgtttcggtgacggaccgtttgcaatgaagatgtcaccacgatattgaaagcctactttttgaatcatatgttgcatcgccaagttatcagggtgcgtatcgatgcgtaaatcatgtgcgcctcgtaaactggcagcggtcaccaataaggttaaaaactgtgtaccgagatgttggccgtggaaggcactatcgagtgcgacacggtgaattgaaaaataaggtgtcgaaccagattgccattgaccattggtaattgctgcatagccaggatcttcagttgctagaattgaggcgaccccaatcacctgttggtcagccatcagaatgtaacataattcttggcgaatctcgtcttcaaactgagtttgattaggttcacctgcttgccattgatttatttggcgatcctttaaggcggcctttgcatgttcgataatctctaaaatccgcggtaaatctgtaaacgttgcttttctcaaatacatcaatgctgccacctcatttttgtcgaattatttaacaaacatggcatcgccgaagctaaagaaacgataccgttcatcaacagcgtgttgataagcatttaagatgttttcgcgaccggtaaatgaagcgaccaacatcactaaggttgattttggtaaatggaagttcgtgatgaatgcatcaacagctttccattgataaccaggtttgataaagattgatgtccagccactatcagctttgagttcaccatcaaacttcgtcgcaattgtttctagcgtccgaatgctggttgtccccgttgccacgatgcggccaccgttttgtttaacttcattcaacgttgcagcagcttcttctgttaaacggtagaattcgctgtgcattttgtgatcttccacgttgtcttctgaaacaggccggaaagttcccaacccaacatgcaacgttaagtacacgagtttgatgcctttatcctgcactttttgcaagagttcttctgtccagtggaagccagcagttggtgcggcagctgaaccaggttctttagcataaaccgtttgatacatttctggatcatctaatttttctttgatgtatggtggtaatggcatttcacctaaagcttctagaatttgcatgaagatgccgtcatacttgaattcaatcatgcggccaccatgttcgagttccttggtcacaactgcttttaattgaccatcgccaaaaacgacttcggtaccaactttggcccggcgtgctggcttcatcaagacttcccattcatcgtcatgcgtgttgtttaaaagcaagacttcttcgtggccgcccgtatcaggtttcacaccatataaacgtgctggcaagacccgtgtattattcatgacaactgcatcgccgggatttaattcatcgataatgtcgtagaaaactttatcttctagtgcgcctgttttgtgatccatcaccaataaacgagacgctgcccgttcaatcatcggtgtttgagcaattaattcttctggtaaattataatcaaaatcttctgttgaaaccattgtgtaacctctttctaattttctgaatagggaataccgagatgttcataaccagcgggcgtcacaacacgtccccgcggtgtccgttttaagaacccaatctgtaataaatacggttcgtaaacggcttcgattgtttcattttcttcaccaatattagccgcaatcgtctttagaccgactggaccgccatgataatagtcaatcatcatctggagaatcttgcggtcaatactatctaagccacgtacatcgacttgtagttgactaagcgcatggtcggcaatcgcttgatcaattgccgcttggtccgccacttgagcgtaatcgcgaatccgttttaataagcggttcgcaatccgcggcgtcccccgcgaacgacgggcaatctcatgcgcgccttcttggacaatggccatgttaaagacatctgccgagcgttcaacgatatcgaccaaatcatcttcatcatagtatgccatatgttcgacgattccgaaacgatcacgtaacggtgccgacaataaaccggcccgagtcgttgcgccaatcaaggtaaacggtggcaatgggaaatgcaccgggtgcgcagttggcccttgtccgaccacgatatcgatgtaaaaatcttccatcgccgaataaagtagttcttcgaccactctcggcaagcgatgaatttcatcgataaatagcacatcaccaggttgtaactcgttcaacaacgcgactaaatcgccaggccgttcaattgctggcccactcgtcgtccgaatctgaacatgcagttcattggcaatcaccatcgccaaggtcgtcttacctaaaccaggcgggccatataatagcacatggtccaacgactcttcccgctttttagcggcttcaatataaaccgccaactcatttttgacccggtcttgaccgatatattgcgcgaggacttgtggccgtaacgtcttttcaatacttgtttctgcgaaatcttcgttttctgcggaaacaattcgttcttctgccatccattagtcctcctttatttcttcattaataagcgtaaaccttcacgtaagtactgatccgtagtttgtgcattgaaatcagccagtgttttggtaatcgctttgacttcgcgggctgaatacccaagcgcggttaatgccgctaacgcatcgtttaattctggtgattcaccaggcgtaccaagttcgatagccgtttgaccagcgatcgtttcggtttgttccaaatcgccgagcttgccctttaaatctaagacaatttgttgggcagtcttcttgccaaccccagggaacttggtcaaatagctcacatcatcattcataatcgcttggattaacccagaatgatcgctattggctaagatggccaaggcactcttaggaccaattccagaaacactgattaatttttggaaaatttgcttttcatctagatcgtaaaaaccaaataacgtgatatccgtatcacgaaccgcttgatagacataaatctgaacgatatcggtcgttgattcggtgtaacgatacggattagcaacttgcaattgatagccgacgccttgaacttctaagacgacatagtacggactaaccgccgtcaccaaaccttttaaatattcatacataaatttacctactttacgagaacgtatatttgcttgttaaattgtaacataaaatccgaatcgtgaaacagccagcagccaaaaagcgtaaaagaagggcctaagtgtgacccacggccaactcaaaccctagcaattagtattcacgaatcttcggcggttggtaatccttgataaaggatgccatcacactgaacgaatcggtaaataagtatttttcaaaatcgacctgtgttaaaaaaccttcactgaccatgtgggctaaaaattgttgtaacaaatcataatagcctgcgacattataaaaaatgcagggaccattttgttgcccaattcgcgcccatgaaataacttcactcatttcttccagcgtaccgggaccacccggcaatgcgataaacacatctgccagttcaatcatcttggctttacgcgctgacatcgtatcaaccttaatcatttcggttaaacctggatggacgagttcttgctgactcataaaccctggcatgacgccggtcacttgtccatcatgggctaacaccgtgtcggccacggtgcccattaaaccaacttgggcgccgccataaatcaagcgcgcattgcgcccagcaatccaagtgcctaacgccttagccgcttccgtgtagattattttattaccactactagcgccgcaataaacggcaatgttttgcgttgccattagtcagcctccttagcggttaacaaccgagccaacgtactgatgggcaagccaacaacattgtaaaagtcaccgttgattttctcaacgagcagacttccctgtccctgaataccataagcaccagccttatcccggtactcttcggtgtctaaatacgtttcaatcatttcatgacttaacggccagaacgtgacatcagtttggacaaccattttgcggatttcaccatcaatggataaccaaacacctgtataagcttgatgcgtgctgccactcaattgccgtaacatttcggctgcatcttgacgatcatgtggcttaccgtaaatcgtgccctgaaaactgacaacagtatcagcactgagcacagtggcctgaggattcttttgggcgatggattcacccttaagttgcgccaacatctgcacgtagtcagctggtgccgtcactggtacctggcgttcatcgattgttgcgggttggacttcgaaatcaggcacgactttttgtaaaagttcgcggcgtcttggtgattgtgatgctaagataaacattattcgccctcccaactatggtgtggatcttgaatccgtttaaacattttttctaaatctttttgcgtgtaatggattaaaaccggtcggccatgtggacagttaaacggattttccgtctgtgccagatcaaccaacaatgctttagcttgcgcatcatctaagtgatggtgtgccttgattgactgtttacagctgatcataatcgccgttttttcacggaaatgggcaatgtctaacttcccgttttccaatacagtgtcaatcatctcgcgaatcgttgcttcttcttggccttgcgcaatccacgtcggatgactatggataacaaaactattttggccgaagctctctagctgcacacccactgcggcaaggagttccttttgtgcttgaatcttaatcgcatcactattgggatattccaacacaaggggcaccaataaattctgggcgtcgttgctaacttcaccaattttttcgcgatagtattcatacttaatccgttcttgagcagcatgttgatctaagatgtaaaagccatcttcaccttctgctaataagaatgtattgtgcagttgtccaatatagcgtaacgctgggaaacgctcaatgggtgctgcatcatcttcaggttgttcaccaaacggatttccgatcgcctctgcttcgtacttatcatcccaccgggccaattgttggggttgttcaaatatcggcaggctatttaaattaggattagcagttggttctcgtttaaggggtgtttcggtttccgcaatttgcgctgccgcttgcatttcagttttaaccggcttttcaggaactatttggggctgaattggccgcaccgtaccagtcgcattgcgccgttgactcgtaatttggtttaaatccatttgaagctggtccacatcgaccggtttcgtttgttttagattctgcactgcatcgggaattaaattctcggtgctgagtcgctcacgaattgctttttcaatcaacgccatcaaagcaggttccttactcaagcggacttcttgcttggtcggatggacattgacatcgattaacagtggatccatttgaatatttaaaacgacgactggataacggccgaccattaattttgaaccgtaacccttgataatcgccttattcaattgataattcttgatataacgaccattaatcaacactgaaatgtaattacgactggcccgcgttagtttcggtagcgatacatagccggttaatttaaaatcgagatcttctgcactgactggcaagagttgcttagccattgtaacgccatagatcccggcaatcgtctgttgtaaatcgttattacccgccgtttttaacagcaggtgatcatcattggttaacgtgaacgcaatctgaggatgactcatcgccaagcgattgacgatatcgatcacgtttgccaattcagtctggaacgtcttcacatatttcaagcgggctggcgtgttgaagaataaatcacgaaccgtgattgccgtcccagggcgaattggattagttttctgttcttctaagacgccacctttaaaatgagcaaatgtccctaacgaatcagcggttgccgtttcaatcgtcaaatcggacactgacgcgatactggctaacgcttcaccccgaaagccaagtgactgaattttgaaaagatcctggcgcgtggcaatcttacttgtcgcgtgtcgcttaaatgcagtgggtacatcttccggttcaatcccatcgccgttatcgatgacttgaatcaattgcaaaccagcctgttcaatcacgatgtcaatttgagtactattggcgtcaatcgcattttctgccaactctttgacaactgaagctggccgctcaattacttcgcccgccgcaatttggttacttaatatttctgacagttcatgaattttccccattagcgttctcctttttctgacgtgtgggtatttagtgctaaaacgtgcttttcaagctaactttctgcgcttagcgctgtgaatcaaatcatcgactgcgtcgctaattcgcttccctgtgctaatgctcaaaagttggacaagcttgaatacactcttatccgaaacgtgctttcatcaacaacttcttccgctttaccccacttgccaaatcggcgattacatcgccaattcgtcaagtgctgtaaatgctcagaagttacccgttgatgacgcactcttatttgtttaattccttttgccatttgtatagcatgtttagcgcgtctagtggtgtggcgctcattaagtcgaattgtttaaccgccgctaggactttagctgcttttggatccgcttgtggtgccacttctggttcgaatagtgaaatttgttcacccacttcttcaaccggttcagcagccggcgcgacagctgcctttggtttatcttctaattgatccaagatgatatctgcgcggttcaacaacggtgtcggcatccccgctaatttagccacgtgaatcccgtatgacttatcagctgggccagccagcatcttgtgtaaaaagactaactcgccattttcttcaactgccccgacgtggacgtttttcaatgcggttagtgaatccgctaagctggtcaattcgtgataatgcgttgaaaagagtgtcttggcatgcacgttgtcgtgaatgtattcaataatcgcttgggccaaggccattccatcataggtggctgttccgcgtccgatttcgtcaaagagaatcaagctattttgtgtcgcgttcataatcgcgcgattggcttccatcatttcgaccatgaaggtactttgaccggaaattaaatcatcggccgcaccaatgcgcgtaaaaatctgatcaaaaatcggtaagttcgcagatttagccggtacaaaacatcccatctgcgccatgatgaccgtcaaagccagttgccgcatgtacgtactcttcccagacatattcggaccagtaattaagagcatatccgtatcggtgcccatttgaaccgcgttgggaatgtatttttggcgaccgagcactttttcaaccactggatgacgcccatccactaaatcaatttcgcgactatcagtcattaatgtcggctgaacgtagtggtagttttcactgactacggcaaaactttgtaagacatcaagggccgccacacttttagcgagggtttgaagccgttcaatctccaacttaacggtttcgcgaacttgcgtgaataactcatattcaagcgcggttgagcgttcttcggcttctaaaatcaattgttctttcgcctttaattccggtgtaatgaaccgttcggcgttggttaaggtttgtttccgttcataacgcccttcaggtagcgcgtctaaattcgcacgtgtcacttcgatatagtaaccaaacacgcgattaaagccaatttttaaattatgaatcccggtaatttcgcgttctttagcttcaagttgtgctagccattgtttcccgttagacatcgcatcgcgataatcatctaatgtttcgttgtaacccgattgaataatcccaccgtcagtcactgaaattggcgcatcgggattgatggccgtttcaatgagctcgcgtacatcatcaaccggatcgagttggtctaacgcacggtcaaaggtctgatcgtcattaatgcccgttaaaatcgttttaatcgttggaatttgttccaaggaagtcttcaactgaattaaatcgcggccattaacactgccaaatgcgacccgacctgctagccgttctaggtcatacacttttgtgagggcgtcttgcaagtttgtccgttcaaaataatggttcatgaaactagcgacttggcgttgccggttttgaatcgcctttaaatccaataatggccgttctaaccattgttttaataaccggccacccattgccgtcttggtttcatccaataaccacaataatgtcccgctcttatgaccagtgcgtaaagaagccgttaattcaaggttcatcttcgcagaatggtctaattttaaatattgggatggctcgtactcttgggcccgttgtaaatgccctaaatggcgcttttgcgtcgttgccaaatacaagaccaattgtttaatcacggccagttcaaggggctgggagatgttttgtgaaacgaaactgacttcggccgttgcatcgccatcttcttgatacgacacgagaatttgttgttgaacaaacgcgtgcacaacctcactggcaacaccgtggttaatgacaacttctttggtttgtaaactcaacatttcgttgagcaataaatccaaactcgcaatctggctgactttcatctcaccagttgataaatcggtataagcaaagccaaactgatcgccatctgccaccactgctgttaagtaattattttgtttggcatggccggctttttcatccatcatcgttcctggtgtgaccagttgaatgacttcccgcttgaccatccctttagcggttttaggatcttccatttgttcacaaatagcaaccttgtaaccttgatcgactagaatatcgatgtaattttgggctgcgtggtgtggtaccccacacattggaattggatcatccgcatttttattgcgtgctgttagtgtgagttccaataattgtgaagctttgacagcatcatcattaaagagttcgtaaaaatcaccgaggcgataaaataaaaaagcgtccggatactgatccttgaccttttgatattgcgccatcattggcgtttctttcgttttttgtggcatgttgttaatccctctctcattgacgttgatctgctgctaaggtgcttaaaattgcgtataggggtgatctggtgaaatctggatcggtttaattgatttagcatgacccgttttgtcatcaatttcaattaaacagccattcaattgacccggtccttcggtcactaattcgaaccgttctggccgttgtgttttaaaccgattaatgatcttttcgcgcttcacgcctagaatcccgttataagggccagtcatcccagcatccgttaaaacggctgtgccttcaggtaagatgcgcgcatcgtttgtttgcacatgtgtatgggtcccaactaacgctgaaatccggccatcaagataccaagcaagtgcgagtttttcactcgtcgtttcggcatgaaaatcaacgaagatacagttggtttctttactaatttcagccaccatttcatctaacatttcaaacggatcaattagtagttcattcatcaaggcgcgcccttgtaagttaatcacggctaatttggcttgattgacgttaatcattgtcatcccttgcccaggcgttcctttcggaaaattggccggccgcactaattttttagcatcgtcgatgaattctaaaatatcgcgcttattccaagtatgattgcccatcgtaatcgcatcggccccagcttgtaaaagattcttataatccttttgagtcatccccttaccatccgcgatgttttcgccgttgataatggtcacctgtggtttgtattgttgctttaatgctggtaggtaatcattgatcattttttgacccattgtgcccactgtatcaccaataaataaaattcgcatgttgcgccccttaatgttctttctcagactttgatatagcttctattgtagcaatttttgcccagaataaaaagttttgctgtacccgtagaaaaacaaaaaaagccccgcgcaccgaaaaggtgagtggggctgataatgtgcttttcaaaccatgttcctgcgtttagcctaattagccaaccaatcgacttcgtcgcttattcgtctaattttgctaatcctcagaacataatcggtttgaacacacttcttcttttaacgtgctttttgaaactgactcttgcgcttagctacaatccgcaaacgatcaactccgtcgctcattcacagatttaggctaatgctcaaagtcaaaccgtttcaaacacacttctcttctaacgtgcttttagttgcaccaacttccgcttaatctaaaattggcagtcatcccacaactcgggataactgccaattttgtattaatgctcggttgctaaacgcacttctttctttaacgcgctcctcgatcagtcttttccggttaactgcaaaatgagcatcatggcaagaaccgccacaatgcccattttactgttaatcctcaaagcctactcagatcgagtcgcacttctagtgttttaagtgataactatatgttgaaataataatgttttcgcggtttgcaaatgccgttcttagtcttagacttgattggttatgcaaaatgttttgccatggttttcttggtacgaattgtgggaccaagaccgtggttgtaaagttccgtttttgcgcattcttgctaacaatgtcaacaaagcgaacaattggtttttgaattgaccggtatgatgaatggacatcgacgaaccggacattcggaaaatcttccttgaattcagcttgaatttcacgttccttggctggattttcatccgttgagacatgcatcgcaatcacataatccccgattgattgtgcgtaatctagcgcaccacgggttacttgggtcacgttgctgaccaagacaatcacagttgaaccgtcataatcatgcaagacggcttctttagcactcacgcgtagttgaagcgccactttcttgtaatgatcatgaatcttatagaaaatccaaatcataacaggcatgatgatgaagaatggccagatatcaggtaagcgataaacgaagagaatgactaagatagcaaacgaaatcaaagcgccaacaaaattggcaattgatttaccaaaccaattctttggtcgttcgacccaccacttgcgcaacatcccagattgagaaagcgtaaatggaatgaacacaccaaccgcataaagtggaatcaagcgtgatgtatccccgttaaagatgaaaatcaatgccattgaaccaatcgccaatgtaataatcccgtttgaataacctaaacgatcgccacgatccatgtacatgtgtggcatatatttgtctttggctaaattatacgctaacactggaaaagcggagaatccagtattcgcagcgacggctaaaataaaggccgttgcaaattgcacaatatagaataaaaagcctttcccaaaggtgtgttgggccacttgtgatagaacagttactttttctgctggtacaatgccgtaccagtagtttaaaaatgtaatcccagcaaagaagaaacctaagatggctgccatgattgctaatgtttcagccgcgtttgttgcacgtggcttcttgaaaaatggtaccgcattactgatggcttcaaccccagttaatgatgatgaacctgatgagaaggctctaaaaatcaacgccatcgaaacacctggtacaacagccccaacggttgatgttgcgtggaacggaatcgcacctgtgaagatcttataacacccaacgatgatcattaaagtcatcatcaagacgaataagtaaacgggcaccattaaaaatgatgctgattcacgcatcccacgtagattcattcccatcaagatcaaaacgataatgaaggaaatccctacttgatgcccatacaatgccggaatggccgaggtgatcgcttccgcacccgcggaaatactaaccgcaacggttaacatgtaatccacaagcagtgaaccacctgccactaaaccagcatttttccccaaattttcactggaaacaacgtaggcgccaccaccacctggataggcgtggatcacttggcgatatgacaaagttaatgacaatagcaatacgagcacaaaggctgcgattggaattgaataccaaattgccgcggccgaaagggtcgtcaatacgatgacgatttcttctgtcccgtaggccactgatgacaatgcatcagaagatagcatcgctaacgctttaaagcgtcctaatttttgattaccctcatcggaagattttaacggtttcccgataaaaatccgttttaactgttgcatagcaatatgacccctttaaataatatttctaacataaaaagccctcatgtgaatatcattcgtcgcaatccacacagtgacttttgaatttctctataacttaaaaaaataattgccgtttattcaaacaaatcgtattctactatagttacgcatgaattactaccacaatttaaaaaagaactgaccaaggtaatcgaaacgcctcgattccttggtcagttcttattttttatgataaacgacgggcaaaatctggtttgtaatctgaaattttagtaattcgaactttatcgccaggttgtggtgcttggataaagtagccatccccaatgtagattgcgacatggtgggctgttccaacccctccccagaataataggtcgtttggttgtaattcattgagcggtacatctttgcctaacttactttgatcttgtgaaacacggggtaatttaatcccatttttagcgtaaacgtattgcactaagccagaacagtcaaatccttcgggtgtggtgccaccccaaacatagggtcgcctaaatatttaaccgcttcttggataatcttattattcattaaatccttgttaccagtaattaatgcggcacctgcatcactcgccgctttttgagcagccgcttgcgcctctaattctttcttgaacttcgtttgtagttgcgttaattggtcgttagcttgttgtttttgttgatttaagtccttaattgcagcatcattttcctgtgataatgataccagcttggcctgttgcgcttctaattcagtcttttgttcagctttttttcagctaatgaggccgtttcagcggcattatccgccttagcgtctaacagtcgattgatgattgaacctttttggaataaatcgctcaaactttggctcgacaataaactatcgatcatatcaagattaaaactgctatctcgtgtttgtaattgccgcaggttaccttcaataatcgccacttgcttttgataatcagcagatgttttgctgaactcgtcttgtttttctttaatatccgcctgttttgcagtcatttgttcgttcaatgccacccaaatggatgacggccctaatgctattgaatgacttggactttcttagctttaacttcttgatagaaaatcgtaacgctcataattaagtatggatagaaccacaagagacctagtccagcagtcatatagacgaccagttcccatccaataaatgataaagtaagcccgagtaatttcagccagttcccttttaaaatcacccatgaaaggctaaagattaatttgagtggtgcttgtggtaaatcaaacttcaacagtactaaaatctgataatacgttaaaatcacgggttgcaacagtgacaaaaccaacatcaccgtcacaaacaataagacagtttcagaaattgtcccctgctggctaatgtttagcaaataaggcgcaacggaatctaatccattaaaagtgaattgaaatacacgatcccaaccgagtaaccgataaaacggcgccaacccaattaatagtaagatccagtttaacacttgttgaacaagattcaataccacaagatgggtatacaacggttgccggaataacaataaggtatcccggtaatagctgggcttattctggctaactttataaacacctaagaaaacagcatttaaaaagataaagtataagaaataattggcaaaggtgttgagcatttgataaccaaatgaactggcgccaaacacgccttcaatcattgagtcgactactatctcaactaacaaccaaagcgcgactaaagcggccattttctgccagtttccttttaataattgacgcgcttttgcgcggtacatagctaattgcaaaaactttccctccgagtttagtagaacacatcactattgagcggtgcattcacaattcgattgtagatattggccgtaattagatagaaaacaaagtaaatgatgataaacaggccgcaaacgatataggctaattgtaacccaggattatctaaaaacaaacccaataaccgaattgcaaagaaggcgtgcatcgatcccaaaataattggcagtaaaaagagcatcaaaatttggaaataaatcgtgcgcttaatctcaccgtcactcatcccaatttttttcaatgttttatactgcaaaatctcttcttgtgcttctgacaattgtttcaacatgatgatactaccagtggctaacatgaagattaacccaataaaaatggcgacatacatataaaatccgaagtttgcgttagcaatatctcggttaggttttttcaaaagcacagaatagcggcttaactcttctagccgttgatcagtggttttaatttcataatgggtttgcccggcttttttgtgcgtcattaaataatcccattgtttgggcttttgagatagacggaataaatcgcgcattaatcgtttttgcttttgttgggcagcggagagctgaactgcatagatttgatcaactgaagttgcttggacttgttgatattcagcatcattggccacaatcacgtttaagttaccatcaaagaagacatcagaaccgttgggaaatagcttacgaatgtgtacaatccgaaaatctgaaagcccagactgttttaattgcaacgggattccagctcttttcggtggcaaacctgcacctgctctgcgaggcatcttcagcattgttaatggtaagttaatgatggtcaccacagtatttttcttcaatttagttgctggtaacttaaattgttgcgccattacttggttgtattgggataatggcatgacaacagctgctccatccattttgatgccttcccgatttaacggtgaattgaccttaaatcgagcatccaccaatttaaacgaagacattgtttgactaaccggctgaacatgatattgcgttaaaattttgtcgaccgctgctttttgactttgtgtataaaccaaatccaccggaatgttctgccgtaatgtatcttgaccgtgcgtataaatcatcgccgcacttccgattgcggtaatagtaactgcacttaaaatcgtaatcatccacaacatctttgcattctttttaaaacgaaaactcaaattcgtaacgtttaacaaatgtgtcccacgataataaagccgtttccagtgccgttctaactgtagccaaatttgcgtataggcctgaaaaaaagccagtgtgccaaaaatttcaagtaataaaatggttagtaaataaaccaaatcaatcccaaaaccatagcgccgctctaagctcggcatcaaaaccagtgtttggtctgccaaataatagccgctgataatcaatacaggtgcaataatcccccataaataagtcagccagttcggtcggcgcactttccgactgactgcagatggttgcagcaatgtcactaattgataccgataaatcatcgtactgtttaaaaaaccagttaataggaacaacccgccaaaggtgaatgtcgtttgttcaatggcccgccatgatattaaaaacggcatggcaaccgcaatccccatcatgcgtaataataacatcgcgaataatttcgaaaaaagaatcccgaataacaacccgataatcagggcaatcacaccgataatcaaactttcaaagaagaagagtaagctaatctgaaatttagtcaccccgatgacacttaaaacaccaatctcccgccgacgccttttaatgaaaaataaattagcatatgccaagaaaaaagcggcaaacagcaaaataattaaacctgctacctggatcatccggccaaaagctaaagattcaccagccatcttgaggtgcctaaagattggcgcagtttgaatcgacgtaaagcagaaataaaccacaatcgcggcaacacaggcaatcacataagccgcatagtcgcgcgcatgattaatcgcatttctaacggttaggtgtaacagcattgaaacggcctcctccacctatggttgcttgcatatcaataatttgattgaagaattgttgccgatcaccattgcgaacgatttccgagaataattgaccatctttaatgaaaagaattcgccgacagtaactagctgtaaaggcatcatgcgtgaccaataaaattgtcgtcttttcctgacgattaatcacggttaaatattgtaaaagctccgtagctgattttgaatctaaacttccagttggttcgtcggccaataacaaagtgggattggtaatcattgcgcgcccacatgccactcgttggcgctgtccaattgaaacttcatccggataacgatccaacaaactactaatgcccaagactcggctaactttatccaaccgtttttcaatcactggcacacttaacttatcaagcgctaatggcagtaacatgttttcgcgaaccgtcagtgaatctagtaagttaaaatcttgaaaaataaagcccaaatcttgccgcctaaaattagcaagcttagcttcccgcatccgactcacaacttgatctttaattaacacttgaccatgcgtcggccgatcaatggtcgcaatcatatttaataaggtcgttttcccagcgcctgaagggcccataataccgacaaactcccacggttcaatatcaaatgaaatattattaagcgcattgaccagactaaaccgatgcccgtagactttcgaaacttgttggactgatacgactgccattttttcacatcccttaactaattggtattcattttagcagagttgaccgcaaaagcccattttataactacgaccttagttggttgtcttttctagtgaaagtggttagtattagtctatctatgtatgaggagaattcattatgtttgaaattatgattgttgaagacgatccaacgattgccaacttaatcgctgagaacttaaataagtggcaattacacgcaaatattacgaccgatttcgataccattttcgaccaatttttaaccaataaaccccatctgattttactcgatatcaacctgcccgtttatgacgggttctactggtgtcgcaaaattcgtgaagtatctaaagtccccataattttcatttctagtcgcagtaccaacatggacatggtgatgtcgatgaacatgggcggcgatgacttcgtcaataaacctttttcgatggaagttttaattgccaaaattaacgccctcttacgacggacttacaactacgtcgaccaaaatgccgatatcatcgaacataacggcctaatgattaacctccaaagcggcggagctcaggtgggtgagactaccattgatctttccaaaaacgaatataagctcctccaatttctgatgcgtcaacacggccagattgtcagtcgcgaaaagttattgcgtgccctctgggacgatgaacggtttgtcgacgacaacacactaaccgttaacatcaatcggcttcgcaaaaaaattgaaagtgctggtttagaagactacattcagacgaaaattggccaaggctatatcatcccctaaggagttattatgacgtttaaaaaattcttacgtgatcatttatttcatatcgcttttttcttcagcggtatgattgttctggatatcgtcctatggctcgaccctagtatgcgctttgctaaggcgacacttttatacctcgatttattgctggcgctttttttctgcgcctttttggttggcttatacgtctaccatctcaagtggtaccgcacaatccaaacacgcttagatgctaaagaagatagcctcaactggccacttacaggcgctacctcggctgaaaaacaattcattcaacactacgtgaatcaactgctagcctatcatcaacaaagcatcgaccgactaatctcagcgcaacaagatcaaaagaatttcattgatggctgggtgcacgaaagcaaggtccccctggcagctactcaattgctcattgaatccatcgaagaccagattccagaagacaaattcaatcaattaaccgatgaactgattcaaattgaacactacgttgaacaagtgctctactactcgcgtctcgatagtttttctaaggattacttggtgcaggaatacgatttaaaacctttagtcaaccaaatcatccgccaaaatcgcaattattttattcaaaaacacatccaatttaaactgcttggtgccgatcaaaccgtcttaaccgacgctaaatggctggcttttattttgaatcaaatcatttccaatgcgttaaagtatacccccgacggcgcacaaattacggtacagattgaacgtgacgaacaaggcgtttggttaagtgtcatcgatacagggattgggattccggctgaagacctaccccggatttttgataaagggttcaccggtcaaaatgggcgctattctaaccaacgttcaaccggtttagggctctaccttgcacgtgtcttaagtgaaaagctcggtcacgaactcaccgttagctcccaacaaggcagtggttccacttttaaattactctttccttttttaagttactacaacacggatgacgatgacggcttattcggcaaaacccatcctgcagacaaatgaagcggagcttcaaaatgcgtaaaacacttttaatcactacacttttaacaataacactcctagcaggttgccaagctaaaaaaccggtttcatcaaccacatcccgcgcgcagccaactacgacgacctacgccaaccggacaacaactaaaaaagccctcgcggccgattcacagacttggttgtttaacaaacaactcctttctaagcaaactaaaaacggtctttctgatgacatcaccgtttcaaatattgctcaaatgaccactcctaaaagttggctgacctctaaaggcaccttcacaagtcagccgattaattatcaacaaatttcgtttaaaaaatggcaacaagatagccgcagtcatctgatgaagagctatcaaaagacactccatctgatgactgtggcacaagtcaacgctgcattacacaaattgggggctgactttaagattaaacacctctcagatctcgtctttcttgagactaagactgggaaaaatacaattgaccaaggattcgttgccaaaggaaatcatctatacgcaattacagctcattacagagatctacaagaacccaccaattttgaccgcggacagttattcgtcagtcaaaaggcaaccgccaaaacaaccgccagtcctgttgccctcgaccaactcaatggcacttggattgcggccgcaacaacgacgagtgctaatgacaccggaaaactgatggtcaaagatggcttcatgtaccaaaaatgttatgatagtattgaacgctctgccattcaagatcttgccaaatacactttagtaacgctcaatcaaaacacaatctatgctgctcaaaaaagggatgcagcacaagctggttatcaattaacccctaagtcgattgctagtggtgatagtatcggttatctctacctcttcatgaatgatcatgaactgctacgcatcggtgctggtcaagtaacaagctatcaaaagacggattcactagtagctgctgccgatttatcacagactgatcaaaccatttttgagcaacttgatcaacaaaagcctggtgaatcagcttcaaccattacggtcaaagcaggtcccgctgttgtcgggatgagtgatagtgtcaactatctaaccgatgcaaccgctgaccagatttcgaacaatatcgtcattggtagcgttcaaaacgggcacgtcaccattgcaagtgagtcaactcattaattataggcacaaaaaaaaggtccgacattcatgtcggacctttttttgtgcttaagccgcttgatcgcgggctgcttcttcttttaaagccatgtctgtggcgatcttgatgaatggtaggtaaatgaccactgaaacaagtaagttcactgctgctaataccccaccttgccaactaaccgttgcgatgaccccaccgataattggtggtgttacccaaggtggcataaccgttgcagcgggcactaacccggtgctagttgcaaagtatgcaattgtaacgatcaccattggtgtggcaatatatgggatgaataaaattgggttcaatacgattgcaagccaaatgttaatggttcgttaatattgaagaccccaggagcggcactcaaattcccaacgattgaatattgtttattctttcgatccactaaccagattgcaatgattaagcctaaagtagcaccagtcccacctaagttaacaaatgaatcaaagaatggtttgttaacaatatatggtgctgctttaccagctttaatcgcatttaagttagctgtaattgcaggtgcattgattgtttgcatgaatggttcgatcatgttagcaccgtgtaacccgaagaaccataagaatggtgtgatgaatgctaataataatgctgaaggatagctgtttgcaagtccttggaatggttcttggacggctttgtagaatgatgtcacaatattttcaacaccaaagcctaatagaattgttgcaaataatgagaagactgcgatggtaatcattgatggcaataatgccgcgaatgattgtgaaactgcaggtggtaccccatcaggcatcttaatgactaagtgtttattacccaataaacgtctgagaatttctgttgaaatcatcgcaacgattaaagcaacgaacaagcccattgagtccatccctgcaagaccgccagcagcaaagaatgaccctaatgctgttacgccggctgctagtggattgatattatatgacttacctaaattgtaagcaactaggaagacgataaacacagaaagaatcgcaaatatcccgctccaagcattgcccccgaatttagtccagatataagccttttcagcgcccttaccaactgtctttgagaacacactatccatgaaattggtatatgccggaattggtaaattattaatcaaggttgcaaaagcacccaagatcatcaatggcatcgttgttacgaaggcgtcacgaatggcaaatgtcgttgattcccaacttttgccacaactggtaaaaagcgtttctccatgaaactgataaatgaatccattaacctcactccttttcctgaatcataattaaaaaataattgctattacaagtattatgttacagaaagcgttgtcaaacgataaccccgttcattacctatgaatgtccagtttttcacaaaaactaaaaaaagcgccaacccattctaatcatggattgacgctcttttttatccgtgttaggtatataccaatgacggaaaatgaaaattaaatttttaataactttattttacatattactttcaatgaacaagctttgcccatataacgggctttttagcggctaatgattttttgacatcgataatccgttgattggcactccctctgaactgcaatgtcagatccatttggtccttcatgaagcgcccatcaactaagatatcaatcttagacagcaactcgagtttatcatctgattcttgcatcagttcttcccacgtatatcccgtccatgaccagacgtcctttgtctgcccataagtggcgcgaattcggtctactagcgataaacaagtcttggtattcaagaacggttcgccacctaataacgtcagtccttggacataagattgccctaaatcagcaataatttggtcttctaattcagttgtataagggcggccatagcgaaaattctgcgccactcgattgtaacaaccagggcaagcaaacatgcaaccactcacatataggctacagcgtaccccttcgccatcaacaaagttaaacggtttataatctgcaatataatcctggcttagtgtttcagaaagccattctttgggcgccggattcttcgggccttgttgttttactgccatcttcaaaaactccttcaaatcccgtattcacaattactgccgtgcaacgttgttattatcgttgccaatggtaatatgcatgtgcttaactcgactggcgatttccttatgccgaccatgcaccattggacgttgttgtggattacctagataaccacaagtccgcttaacgacgtcacatgtagcagcatccgtgttcccacattgtgggcattggaacccgcgttctgtcggcttaaagtcccctttaaacccacatttaaagcattgatcaattggcgtattcgtgcctaagtagccgacacgatcgtaagcataatcccagacagcttctaaagcctttggattttgacgcagatttgggtattcacagtaatgaatgaacccaccagaacagtattttggataatctttttcaaaatctaatttttcaaatggggttggtgctttacgcacatcgtagtggaaactatttgtgtagtattctttgtctgtaatattttcgacaatgccaaatttttgcgtatctttttgacagaacgtatttgttaaactttctgctggtgtgctgtaaacagagaagtgatagccgtattccttttcccaatcaacgcagtgattatagaggtctttaacgacgtctaccgtaaaggcttttgccttggcatccttttcccagtctggcccaaagaaggctgtaccgacttcataaaggccaatatagcccaatgaaacagttgcgcgtgaatttttaaagacttcatcaacactatcggttttcttcaaacgcttgccaaaggcaccatattcataaagaatcggcgcattttctggcttcgcttctttagcgcgttccactttaaagaccagggcttccttgcagacttgcaaccgttgttctagaatttcccagaacttagcttggttgccatcagcttcaagtgcaatccgtggtaaattgattgtcaccacgccgagattcatccggccactattcacttcttcaccatgttcgtttttccagccttgtaagaagcttcgacaacccattggtgctttgaaagaacccgttaattccaccaacttgtcatacattaaaacatcgggatacatccgttttgtggcacattcaacagctaattgtttgatgtcataatttggatcagttggatttaagtttaagccgcgttttactgcaaaaactaatttagggaagatggcagtccgtttttctttacctaatccttcaattcgaattgaaagaattgctttttgaatcgcacgttcaatccagttactgcctaatccaaaaccaagcgttgtaaatggtgtttggccttgggatgaatataaagtattgatttcatattccaacgcttgcatggcgtcataaatatctttttcagtcttggtttgcgcataatccttttgttttgcttcgccatcaatccaattcttggcatctgctaaatgtttggcataattcttttcggcaaatggtgccaataattcatccacccgatcagcggaacaaccaccatattggctagaagcaacgttagcaataatttgtgacatttgtgccgtagcagtttgaatcgaatgtggcgcttcaacttcggcattcccaatcttaaagccatgattcaacatttctttaaaatcgattaaacaacaattggtcattggactatatggttggtaatccaaatcgtgccaatgaatctcgccttttaaatgggcgttcgccactttatcaggcaacatcttaagccccatcgctttagcaactgtccctgccgttaggtcccgctgtgtattaaaaacatgactatctttattcgcattttcattgaccacagtttggtcttttttcaataatttttgaatggtaaagttgatatcagttgccttattccgggcaaagtcccgttgcgtccggtagttaatgtattcttgggcaatatcatattggtgatgttctaaaagtttatgttccacaatattttgcagttcatagattttaacatctttatcaaatcggctgccgacttcactcacaacatctagtgcgactgtgtttaacacttgatagtctaatggctctaattccgtcttcacatttttagcggctttaataattgcttgttcgattttatccgcagaaaaaggcatgattcgcccatctcttttaatcactttaatttgcaagtctgcttctgaagcaattttcatatccatcttagcaccagtctccttttgaatcagtaaccccatcatagcggattaaaaattcggattcaacctatatatagtagataaaccaacaaaaagacgcactgcaactatatgttgtgtgcgtctaattgtgtgcgatattttctttcgcccgtccttatcgaaatctacttcatactgcttaaaaaaagattgacatcatgcatctcgttttaatttcaaagtcattgcattaacagccacaacaattgttgagagtgacattaagattgcaccaactgctggacttaatactaacccaattccggcaaatagccccccagctaatggaatcgctaaaatattataaccagcgccccaccagagattttgcgtcattttgcggttagttgcgtgcgataaattcaagaaatgcataatatcgtttggattactcttcacgaggatcacatctgctgaatcgattgcaacatccgtcccagcaccaattgcgattccgatatcagcccgcgttaaacctggtgcatcattaacaccatccccaaccatcaggacgacttcgcctttagcttggtaatctttgacgattgcttctttatcttctggtttcaagttcgcttgaaccgtcataccgcccaattgtgcagccactttttcggcaacttgttgattatcaccggttaacatgaccggttggatatgccgtttctttaatgcttggatgaaagctggcgcttctggtttaatctgatcaccttgtgcgactagtcctaaaaccgtttgatcttgtaatagataactgatggaattccctttttctgctaaagtttggaaaagagcttgatcaaatttaatatgctgggcttgtaaataagttgccgtcactatttgataactttgccctgcaaccgttccagacaaaccgacgccttgaatcgtttgaacattgtctgcctgtaaatcaggaatagtttgtgcttggttatactctagaaccccagtggccaatggatgacttgaatggcgttctaacgcaccaaagagttgcatgagtcgttgttcatcaagtgctgtatcgaaaacttcgacagcattcactttgaatgcgccttgtgtcaaagtccccgtcttatccatcaaaacaacggtaaccttatctgacaattcgattgcttcacggttacgaatgagcaagccgtttgtagccgcaatcgctgtacttctggcaaccaccaatggaatggccaatccaagtgcatgcggacaagcaataataaagacggttaccatccgttcaaaagccgtattcagatcggccaagaacacccaactaatgaaggcgataatcccagcaaccaatgcagcatagaaaagatacttcgcaactttatctgctaacccttcaacttttgatttttcttgttgtgcttgtttaattaatttcatgacttgcgctaagtaaccactttcgccagtcccggtcacttgcacggttaacgtcccatttccgttgactgtcccaccgattacttgatcgccttcagccttcgcaacagcctttgattcacctgtcactaaggattcattgacttggctttgaccggcgataattaacccatccgcgggtactttttcaccagctgcgactaatacagtttgtccttttttcaagtcctttaaatcaaccgcgtgttgatgccctgcttgatcaattacttgtgcttggccgggtaacaaagcagccattttttctaaagcactccctgcactcattaccgcattcatttcaatccagtgtcccaacaacataataacgattaacgttgcaagctcccagaaaaagtccatcacatggccttgtgggttcaagaaatggttcgcaacaaaggcgtataaactatatagataagaaacactgatccccattgcaattaaggtcatcatcgctgggctcttagcagataattctccttgagcgccctttaaaaacggtgccccaccgtaaaagaagagaaatgttgctaaaatcaatactagccaatctgaacctgggaaagtcgtttgaaaaggtaactgcatgcccataaatggtgagagaattagaattggtaccgttgcaattaatgaaatccagaatttttgttttagatttcccatgtgcatcatatgaccaccatgcatcatcatatcgccgtcgcccatgtcatggtgcatcccatgcatatcgtgattcatatgccccatatcatgatccatcatctcatggtcatgatgcatgtcgtgcatgctgtgatccatttggtgctcgtgatgcatctctttcatatcgtgtccttcatgttcatggtgcatttcatcgtgtttcattttacttcctcctctatgcaatcacaattggctggtaaacaatcacattcaatcattgttggtgcactaggtaatttagccgctaacaccgtttgtaacgtctgaatatcattttgactgagcgttgtttgctcgattaaagtggctaatgtgcagccttttttcatcccacataattggttaaacagcgactgcgtggcatggttcatcgcttcatcttctgcgatattggccgtatatataaatcggcgcccttctttagtggcaattagatagtctttttttaccaaccgacctagcaaagtcttaacagtcgacgcttgccaatcacgcttttgctgaacgagttcaattaaatgactgctgttgacttgcccaagtgaccaaaccatccgcataatttcccattccgcatccgtaacaacccctattttttcagtcattcgcggttttctccctttcgtttacatttgtaatcattagttacagtttacatttgtaatcgataactgtcaatcttttttgctcatccaaattttacgcacaaaaaaagaccgccacagtgggcggtcttttaccatttaattaaagattttgcataaaatcttcaactaatttttggttttcttcattacttatattcacattaacagcggtttcaactaaatcagttaattgagttgtatctaaacgtttcatcaagctccgaacccgaaggaccgaagttgcgctcattgaaaattcatctaagcccattccaacaaggagtggtgccatgactgaatcgccagcggcttccccacacattccagtccacttaccttctttatgagaagcgtcaataacgttcttaattaaacgtaagattgctggattgtatggttgataaaggtatgatacacgttcattcatccgatcagcagccattgtgtattgaatcaagtcgtttgttccgatactaaagaagtcaacttccttagcgaattgatttgccaagacggcgctggctggaatttcaaccatcatcccaacttgtaaatcatcagaaacagtttgaccatcagcaattaatttagctttttcttcttcaagaatgccttttgcttgacggaattctgcgacagttgcgatcattgggaacatgatacgtaacttaccgtagtttgaagcacggagtaaagcacgcaattgtgttctgaaaatatcatcacgatctaaactaatccgcacagcacggtagcctaagaatggattcatttcttcgggtaatggcaagtaaggtaatttcttatccccaccaatgtccattgtccgcacaacaactggtttaccagccataccttccaaaacagtcttataagcttcgaactgatcatcttcactaggtaattcagatgagtccatgtataagaattctgtccggtataagccgattgcttcagcaccgttatcgataacaccatctaaatctttaggtgtcccgatatttgcagcaactgtgaatgtttttccgtcttttgtaacggatttttcattctttaacttttcccattctgctttttgatcagcgaaagcttgcgccttcttatcgtattcagcaatgtctgcatctgtaggattgataataacatccccgttaatcccgtcgacaattaattgttcgccggctttaacagaagttgtgatattttcagtcccaacaattgcaggaatttctaaagaacgagccataatagcagagtgagaagtccgaccaccaatatcagtcacaaaagccttaacgaatttaccgtttaattgggctgtgtcacttggtgtcaagtcatgagcaatcacaattacttcttcatcaattaacgctgggttagggagtgttacccctaataaatgactgagaactcgcttagtaacatccttgatgtcagcagcgcgttcttgcatgtatgcgttatcagtcatagcctcaaaagtggccacgaataaatccgcgatctctttgagcgcttgctcagcattaaccttgtcatcattgattttaccttcgatagcgccggtaaattctgggtctgctaaaatcatcatgtgggcatcaaaaacttgtgcttcttcttcccctaatgatccagcagcaatcttccgaatggtctctagatcactcgtggaagcttgtaaggcattatgcaaacgattaatctctttttctgaatctgaaatagttgatttcgaaaatgacaaatcgggttgcactaacatataggctttcgccgtagcgataccatcactggcagcaatccctcttagttttgtcattattcagataaaccttcctttttcattgtttcttcaattgcgttgattgcgtctgcttcgtcagcaccttcagctgagatagtaacgtcagcaccttggccaacaccgagtgacataacacccatgattgacttcaagtttacagatttacctttgtattctaagttaacatctgagttaaatttgcttgctgtttgtactaataatgtagctggacgtgcgtggatacctgtgtctgctactacgtgaaaatcgcgtttttccatattaatcgatccccttttatctaattatagatttagtttttaacgaaatgagtggtcactaatagtggctacccttccgatatttaagattaccattttttttaaaatactacaatagtttcgctaacaaaattagtagccgtctacactataccgctttcagacttgcggtagattaccgcaccatttcgttgtgcttcgcccacaatttcttttcgatggtcatagttgacccatactttctgaaaatctaaaaattcggactgagcaacctcaatctcagtttgttcgttatttattaaggcatccatctctgctaaaaaatcacgcatctgccattctgcctccttttcaattcttttatcgtggcttgaaaaattcgttttcattccatctgcgaaataaaacgatgacctcatactaccgcataccgcccatacctgacaagaaacttttattttcgagttgcctgacttgcaactttttttagagatgattataatttggataaaggtcaaagatagtcaagaacactttgacgattctattattaatgaaaggttgtgacagattaatgctttgtcaaaactgccagaagaatcctgcaacgattcatctctatacaagcaccaatggtcaacgacaagaaatcgatctttgtcaaaactgttaccaactcttgaaacaacaaaacagtaatggccaagcaccacaagggcaatatgcagatccatttggctttggaagcctggatagtttcttccgagcaatgggcgcaactcccgatgatcaatcacaagcaaaccaagggccacaaacccaaagtggcggccaaggtggcggcaacaacgggcaaaacggcgaaagtctgctcagtcaatacggtgtaaacctaaccaacttagctaaagctggccaaattgatccagtgatcggtcgcgatgctgaaatcgatcgtgttattgaaattctaaaccgtcgaacaaaaaacaatcccgtattaatcggtgaagctggggtcggtaaaaccgccgttgtcgaaggcttagctcaaaaaattgccgacgatgacgttcctgccaaacttaaggataaacaagtcattcgcttagatgttgtttcacttgttcaagggaccggtattcgtggtcaattcgaacaacggatgcaacaactgatgactgaattgaagcagaataagcaatacattctcttcattgatgaaattcatgaaattgtgggcgccggtaatgccgaaggtggcatggacgccggtaacgtgttaaaacccgccctcgcccgtggtgaactccaactagtaggggccacaacgaataatgaattccgacaaattgaaaaagacgcggccctcgcccgtcgtctccaacccgtttcagtcaatgaaccttctgttgacgaaacagtccaaattctaaaaggactccaagataaatacgaagcctatcaccaagtccactacacagacgaggcacttaaggcggctgcaaccctttctaatcgttatatccaggatcgtttcttaccagataaggccattgacttacttgatgaaaccggctctaagaagaacttgacgattaccgttgtcgatccaaaagaaatcgaaaagaaattacaaaatgcggaagctgaaaagcaaagtgcgttaaaggacgaggattacgaaaaggccgcttattaccgcgatcaagtcacaaaattgaccaagatgcgcgaaacaagtgccattgaccaatctgaaatgccaaccgtcaccgacaaagatatggaaaaaatcgttgaagaaaaaacccacattccagttggtgagttaaaggcacaagaacaagcacagttgaagaaccttgctgaaaatcttgaagcgcacgtaattggtcaagattcagcagtcgataaggttgcccgttccattcgtcgcaaccgaattggtttcaacaaatccggtcgaccaatcggttctttcctattcgttggaccaaccggggtcgggaaaactgaattagcaaaacaaatcgccaaagaacttttcggtagcacagatgctatgattcgttttgatatgagcgaatatatggagaaattcagtgtgtcaaaattgattggatcacctcctggctatgttggctatgaagaagcgggtcaattaaccgaacaagttcggcgcaacccatacagcttgatcttactggatgaagttgaaaaagcacatccagacgtcatgcatatgttcctacaaatcttagacgatggtcgtctgacggattcacaaggacggacggtcagcttcaaagacaccatcatcatcatgacttcaaatgccggccaaactgatgccgaagccaatgttggtttcggggcaaccctttctggtcagacacactcgattttaaaccaactacaaaactactttaaacctgaatttttaaaccggtttgatgatatcatcgagttccaaccattaagcaaagaaaatctcttgaagattgtcagtctgatgctcgatcaaacaaatgcgatgattgctgaccaagggttaaacattgccgtaactgaaccagtcaaatcacggcttgtcgatcttggttacaatccagagatgggtgcgcgtccattacgacgtgttattcaagaacaaattgaagatcgcgtggctgactattatctcgatcacccagaacataaacaattgacggctcggttggtggaagatcagattcaaatcaccgatgctaaagattcacaggtcacagattaaaaggctttattatctcaagttaaaacgaattacgtgccaaatgaagcgttttcatttatactagtggtaagacttaaacacccagggagtgatttagatgcgcttaatcaatgtaaccaattcttataagcgacttgtttcacaacaactcgctgcaacagccgcaacctacgttaaggtttattcacttggtaaaacaacggttcttgactcgcgttcatcgaaggaacgtgagctccttttaaaaaatgatcatcgacatgtccaacaagccgagatcgattttgtattgaaggaactcgccggtttagattccacagatggccttgaagtcttgaatgatggtccattagtcgaaattacaattccaacaccttcaaaaacagtgagttaatcattcgaaccgccccgacatttcagtttgttggggcggttttttacataggcaaaataatggcaattgaataggtcgtatcgtataataactttcaacctaatttaggaggattaatgacgcgatgaagacttttcaaaaagagcaccaaattatttgccggttagaagtgggcgacgaaatcctaacagaacttaaatatttggccgcaaccttccccaaccaactgggaactatcacggggattggtgcctgtgatgaagttaccgtcagcgtttattcaccagaaacggatcaatatattgccacttccagtcaagagcaagtagaactgctggcccttagtgggaatgtcgaaaatgcaaatggcacgattgatgtccatctacatgcaagctttgcccgtttagatacaagcgtttttggtgggcatctagaacgcgccgtcatttcacgtacaggagaattaatcgtttccttaattcccgtttccatcggccgcgtcacccatactgcaactaaattacaagtattagatatttaaacgattagaatcactgctatttttgcaggggttcttttttatgcccacttgacgcgttaattatcaaccacactttttgtaatttatgatagactagtagtaataagtaatgcgctacaaggagtccgtatgaatctgattaacctgcttcaatcgttattgaaatggcgcccgaaaaaagcagctcctctaccgaacagtcatgtacgccaaactgtctctgagcaagagcccatccgtcaagcgcctcaatcgtcacagaaacagccggtcgttcccgttagtcaggacgcaacgccactgctggctacgatgtccacacaaccgcgccatagcacagttaccattcactacctcgatcatcatcgggtccctttacgaccaacgatgaccctgacaggtgaagtgggtaccgtgctcaatttgccatggctaaaatttgccggttattacttggcagctattaccaatttaaaacaacagtttcctgaagaaaacaccactatctggcttttttataaaccgcaactcgcagcaccagtaatggtgttacaccagaatttagaaggtggcttgttgattaagccccaatttttatcaggtgctttgaacgaacactatcaagccaatccactagaaggtggtgctaacttcgtgcaccacacctcagctaatcagactggtcgctttacaactaagacacagtttgtccattttaaatatgatccgctgaatttaaaacacagcgatgcacctgaacagcccttcatcgaacttcttgagccaacggatacctatcagcaaccaagtgaagaagcgctgactgctgctcgcttgccaaagcacgcggtttggaagatttatagctgtgcaactgctccatctggcaaacaatggttcaatcttggcagttcttggattacccctacgcgttatcaattacatgccactaatcctaaaggcagtgatgaatcataccaagtaccaaagttcacctaccattacgcagttatcgaaacaacccctctaaacctcagtgcaagtctgaacaacaataccgtaacattttggcaagcaccgtatgaccaacccacaacatatcagatagtgcctaaaacacgggtagtcgttaagcaagtcgttgtactcgataatcaaagtcgctggtgtcaacttaaaacaggtcaatggttaatggaaggcctcctaacttttgactaaatacccccctaacaaaaataagccgccgattcagacaacagttagtgtgtctgaatcggtggcttatttttgtttgactctttatattatagttttgcggttaattcaacgtctggatacttatcttggaaccaacgttctgcaaattgattttcaaataagaacaatggttcgtcatgaatatcttttaccaatagatttcgtgaggatgacatccgttcatccaattgttctggattgatccaccgcgcagttcttgaaccgattggatccatcaatacttcagaattatattcgtgttgcatccgatattggaacacttcaaattgtaattgaccaacggcgcctaagatataatcgccagttgtgtaagtcttatacaactgaatcgccccttcttgaaccaactgttgaatccctttatggaaggacttttgtttcatcacgttcttggcagtgacgcgcatgaataattcaggggtaaattgagggagtttctcaaatgaaacagcctctttacccgtgtgaatcgtatccccaatttggaaattcccggtatcatataatccaacaatatcgccagcaacagcgcttgtcacttgttcccgtgtgtcggccatgaattcagttgaattgttcaaccgcatcttcttgcctgttcgcgtcaatgtgacatcaatgccgcgttggaattcacccgaacaaattcgtacgaacgcaatccggtcacgatgagctggattcatattggcttgaatcttgaagatgaaccctgagaaatcaggagaggttggttcaaccaacgtttcttcttgtgttttgtgtgcttctggggcaggcgctaagttaacgaatgattctaagaacgtcttaaccccaaagttagtcaaagcagagccaaagaagattggtgtttgttcacccgttgcaatcttatcagcatcataggcattgcctgcttcaccgatcaattcgatatcatcaagggcttgtgtgtaaacagaatcttctttcaatggattatcaccggcaatccgacctgcttcatcaagggccaaataagggttggcttcgtcttctggtcgataaagttcgattcgacggttggcgatatcataaaggccacggaggtcttttcccatcccgattggccagttcatagcacagccttcgatgtccaatagttcttccaattcagcaatcaaatcaagtggttcacgaccatcgcgatccaacttattcatgaaggtgaaaatcggaatcccccgcattttgcagactttgaataatttcttggtctgtggttcaatccctttagcagaatcaatgaccatgaccgccgcatcaacagccatcaaagtccgatacgtatcttctgagaaatcttcatgtcccggtgtatccaaaatattaatccgcttgtcgtcataatcaaattgcatcacagaactggtaacggaaatcccacgttgcttttcaatttccatccaatcggacttggcaaattggccactctttttccctttaactgttccggcttgacgaatcacgcccccgaaaagtaagagttgttccgtaatcgttgttttaccagcatccggatgagaaataattgcaaaagtacgacgacgatcaaccgccgtttttaattcaataggtgtcattataaaatcctttccgttattccaatataatgcgcttgggacaaagaattgcgcaaccattgcgtcaccctttgtcccattgattgtgctcatttaatttagtcgacttcttctggtgcatcggtctctggttctggtaacgttaattgtaaatcaatcaaccgtgaaccggaaaccgaccccgtcgttaagctcatgccacctggcagctcaattgtttccggatgaccactgactggaatggcaccaatttcagtaatcacgaacccggcaattgtatccacatcagtgacttgaatatctgtattgaaggcactgttaaattcattgattggcatacttcccataacggtgtaatgctgcgcatcaattttttggtacaattcttcagctttatcagattcatcatcgatttcaccaacaatttcttccaataaatcttcaatcgtggctaagccaacaacgccaccgtattcatccaacagaattgccatttgttgctgtgtgcgtttcatttcaaataataaatcatcaattgtaatcgtttcgggaacaaaaagaggttctttcattaccgcttcgatttgcatggcctgaaaacctttttggcgtgcttctttcaagagattcttgatatgcacgacccccaccacttgatccttatcatcccgataaaccggaatgcgggagaatggttgggctaagatggcatcgatgttttgatcgttgtctgcacaaatatcaatcataaatgcatcagtccgcggtaccatgacttcgcgcgccatcttcttattgagggtaataatcccctctaacatttcgtattcatcggtttccagaacaccggcactcttcccagattcaatcatgtggaccatttcttctcgggtgagcttcggttctgtttctgaaaaatcaattggtgtcaacttcattaagagcgaggtcgacattgatagcaaccacacgaatggtcgcagtaagataccgacgatccgcacgggttgcaccgttattttagcaattgcttctgcacgatgcagtgcaacttgcttaggatataattccccaaaaaccagggatacataggataagacaatcgtcacaattaatacggccgcttcctttgtccaagccgcatttcctaaaaggggtgctaatctacccgcaatggttgtggcagcactcgctgaagataagaagcccgcaaacgtaatcgcaacttgaattgttgctaaaaactgattggaatgacctaagacttgaactaatactcgcgccttcttgtcacctttattggcttgctcctccatcttcacacgacttagtgacacaagtgcaatttctgccgcagcaaaaaaagcattcactaaggtcaaaattaatatcaacagtaactgtccccacaccgaacttccagggtcaggattcatcgtcacatccactacctttcattatctaaataagtacatttagccgaatatggcctaccttgcagtatagcatagtcaaaaatggaaattcaacctgcatcttttaaaggtcggtcccttttttagctttagtccgtaacgcttgaatatcatataaataagtaatcactgtcttggtaacagcataaaacggaatcgctaaaatcatgcctaaaatcccataaatattcccagcaaccaataagataatgatgatggttagcggatgaatatctaatgaacggccaatcacgttaggataaatcaagttcccatcgatttgttgaacaacaatgacgacaacaatcaccatgattgttttgggaatcgaaattgataaactgataatcaacgcgggcgcaatcccaatataaggccctaagtatggaattacgttagaaacgccagcaataaatcctaacaaataagcgtatggcatcccgataatgagataaccaataaatgtaaagacgccaacgaataaacactctagagcttgaccaccgatataagctgaaatcgtcgcccccatcttccgaagcaagtccgccacttggtcgttataacgatcaggtaacatcttttgaatattaggcactaaacggtgtccgtcttttaacatatagaacaacataattggaatcgtgaagacactaactgtaacgctcgtaatcgcaccaatcatactaccaaaaccagatgtgaaactcttcataactttttcagcaatcttcgatggttttaaatctaactgattgacgtatttattgaagtcaatgtttttcaagcgcggattgctagataaatcatccgctactttttgcagtcgatgagcaaaatctggtaggttcgtcacaagctgtgtgatttgtttaatcaagttaggaatcacagtggctacaatgaaaattaaaccgccaaaaaagacgatgaagataatcgtaatcgcccagttgcgtgatattttgagtttacctaacagattgattagcgggttaaacaggtaaaataatagtcccgcgccaataattggcccaaataaagttgaaataaaggtgccaattggatcaaataagaaactaattttggtgcaaacaaagattaacacagccaaaatcaaaagctcaattgaccaaaataatagttttgattggcgtaaacgatcaaacatgcagtatccccccagtgtgcctatgtcacacaaaacgcattttatgctatcatagtgtaacgattattgttattgtaccaaattttatagtgatacacattgattattccttttgaagaggtggttttttaatgttagtgaaacaaactcgtgatttaaaaagtacggtttatcaagatagtttggcaattcggcaagccgtattcgttgttgaacaacacgtgcctgctgaacttgagattgatgaattcgaagaccaagcgatttattttgtcggctacgttgctgatcaagccgttgtgacgttgcggctcatcgaagcggactcagattatcatgttcaacgtgtcgcagttagccgttcagcacggcatcatggttatggtcaagaactgatgcgtgccgctgaagtttttgctcgggaatcaggcaaagcaacgctcactttaaatgctcaattaagtgcagtaccgttctatacgcagcttaattttcaagcaaccgccaaaccacagttcctagatgccgggattatgcatcaagaaatggttaaaaaattaactgactaattgtcatttcaccactaaatgacttataatgaacacagcttaataacagaaaggacgttaccatgcctaagcaaaaatcacttcttgtccacttatttttcttcattatcccttatctactcgtcattacgattgccgcaacggcttacgacagtcttgtgattcacagtgccacttgggatcgcaccttgttcagtgctctaatcagcagcaccctaatgttatttattaaagttccaatcgaacgaccgttgacgattatggctgacttagcccctaaccaaacacttaaaatggtaacaagtttcttcctagtagaacgttcacttggtattaagattgctaacttcatttttgatggcatccttttctgccttgcaacttatctattacgccacttcttgccactcaacatcattgctggtagtttactcggctggtgcgtcttcgcgcttttgctatccatcagcatcggtgctggcatcggctttaaaacattaacgattcaacaagatacttcagtcgaaaacgattaacccatacaaaaaagccccagtcaatcaatgactggggcttttttgcttgagactaaatagtgttctaacgacggtgcgccaattcttgataccggttataccaaatatcaatgtattccttcgaaaagggccctttgccattgttgatccaatcaaccaaaaccttaacgttggcttttaaaatccgatcagtttcggcggaataatgccattgcgcactgtgcgcttcatattcatcgacatctagaagccgtttttcgccattggggaaaaccttcacatctaaatcataatcgatatacttaagcgcctcttgatccatgacatgcggcgatgccaaattacaataataagaaacgccgccctcacgaatcattgccaccacgttaaaccaatacttcttatggaaataaataagtgccggctcccgcgtgacccactttctgccgtctgactctgtaactaaggtatgatcgttacaaccaatgactgcgttctcgctggttttcaaaaccatcgtatcgcgccaagtgcggtgtaaactcccatcgtgtttataactttgaatcgctatatagtcgccttctttgggaatactcatcgacatacccagctttccaaggttattattcataatcacctatcattatagcaaagactcgcaaatttacctaaaactttctaccattaattggttgccaaacgtgccgctaacttcttttgcacagtcggtaatgcaacgtcagctaattgtgcctcggtataccattggcctgggaaaaaggcgaggtcggcatctgctgcaagttgtgcttctaaaagggtaattgtccatttaagatgcgtaaaaacgtgcaccacaggttttaaacctgattcatgtaattgctgcaattctagcgcaaaagcctctttaaaataagcttcgatacgagctaattgttcttccggtgtcaataattcatcgtcggttgcttgcaagtcttccgcagcgactagtggataagtggacaggttcgctaataaaccggtactcggtcgtttttgaaataataagcccttttgcgagcgaatcacaactgcaaacatcgcaaccggtttttgttttgctttcttcgtcttgactggataatccaataaggtgccatcttgataactccggaaaaacggtgctaacgccgtctcaccaaccgttggattctttgccgtacaaacttgcgagccaaaatccatcacggcttggttaaagtcacctgggcgatctttgggaatcagcggtaaaatcgcatcgtaaaaaatgtggcggttctttgggttggcaatatcagcatcgattttcaataaccgactgaacacccgaaaagcattgccatcgattgccgggacgacttcgccaaaacaaatactggcgatagcgcccgctgtgtacggtccaatcccggctaacttttctaattcagccgcggttgttggccactgaccattgtaatcgtcgacgacttggcgcgctgctttttgtaagttacgcgcgcgcgaataataaccaagtccctcccacgttttcattaataagtcctctggagcggccgctaagtctgccaccgttggaaaagtcgccaagaacctttcatagtacggaatcactgtttgaacctgcgtttgctggagcatgatttcagatagccagacacgatagggctcttgattctggcgccaaggcaagtcccggcgattttcatcataccaagtcataaacgcggtttgaaacgcgtcccgttcactcggtgtcatctgatagttcttgttcatcgatgaagtggttgattgcatcaatattaaatcctttccgatacaacgcttgttgcatcttcatccggcgttctcgtggttcgagtaatcgataacggcgccatttttttgcaccaagttcagcaagcgcgtcagcttcactatcttcatcggcttcaagggccaacgcttcaataattaaactaaggctgtcaccgccaaaccctttttgcattaaaccttgtttgactttttgctgctgttcaaagaatgaactatgacggtatttcttcgccaacttcttagcagctgctaacccaaccgcaacttgatcatccactgaataatgactaagtgcttgatcgatatgggcagcactaacacctttttggattaatttctggcggaccactttggggcccttatccgcggtattaatcacagtacgaacgtagctatcggcgtaatcctgatcgtcgatataatgtaactcgcgtaattttgccaagctagtctggatcccttctggagtgatctcgtgttcgcgtaaatattgcgttagttccttttccgtccgcaattggtgactcagataattgagcgccaattgatacgctttggcattatcatcgtctttttgaatgtcgcgttgcagttgactatcaatctctaaatccttcgctaaacggtatttaatcaagacactctcggtcacgccgaaagcgaattgctcatcgataaaaatattatagcggcctgattttttctgtgccgttattttggtaatcttcggcatgttattctcccttgttacgtgttgctttgatgtttaaatagactttaaatccaatgaccacgacggcgagcactaaagtcccgatgatcagtggtaagctcttgtgttggaaggcataaacgccaattccgagtacaatcagcatggcgattaaaaattgatttcgttcccaaaaattcatgtggcttcgctccttactttgacttcctgtagcatagcataaatggcgcacccggacaaaagtcactgcttaattcccactattgaagcgatttttcagtgctaagtctgttatactgaatgcaatgagaaaaacgagtatcattattttatattaataggagcggattaaatgccagaacaaacaaaccaagtcgaagtcggccaacgttttccattgacgattaaacgaatcggcatcaatggtgaagggattggctattacaaacgcaaaattgtctttattccaggcgcacttcctgaagaagtggttgtcgcagaagtcaccaacgttgcccctcgtttcattgaagcaaaagtccacaaacttcgccaagcttcaccacaacgggttacccctaaggatgccacttacggccaagtcggtgggattgagcttgaacacttaagctatcctggccaacttgccttcaaaaaagacgtcgtcgtccaagcgcttgaaaaattcaaaccacaaggctacgcaaaatacaatattaccgatacagtcggaatggaaaccccttggcattatcgcaacaaagcacaattccaagtccgcgaaatcgacggtcatttagcagctggcttatacgctccaagtagccatactttaattgatttgcctgaattcgcaacccaaaccgatttaacaatgaaaatcatccgaaccgtcttgaaattagtcgaatcactcggaattcccgtctttgatgaaactaagaatgctgggattttaaaaacattggtcgttcgcgaatctttttcaaccggtgaagcgcaactgaccttcattaccaactcccctaaactaccgcaaaagcacgcattgattacagccatccaagctgaattgcccgaagtggtttcaatcatgcaaaatatcaacaaagggaaaaacgtgctcgtttggggcgaccaaacgattcatctggctggtcaagaaacgattatggaaactttaaacggcgttcacttcgaattgactgcccgcgcctttttccaattgaatccagttcaaacggctaagatgtataacttagttcaagatgcacttgatctcacacctgaagatcgcctcgtcgatgcttattgtggggtgggtacaattggcttgagtcttgccaatcaagtcgcagaagtgcgcggcatggacacgattgccgattcaattgaagcggctaaacacaacgcagccatcaatgacattcaaaacgttgaatatgccgtaggggctgccgaagacctcctcccagaatggttggataatggcttcgtcccaactgccttggtggttgacccaccacgcactggcttagatcaaaaattaattgatgccattttagacagtcggccattgaaatttgtctacgtctcatgcaatccatcaacccttgcacgggatttaaaagccctcgtgcatacgtaccaagtggaaaaaatccaaccattggacatgttcccccaaacggcacgagttgaagcagttgtaacattaacactaaaacgcgacctataacgcaaaaaagcggtccatcaacatgtgtttgttgatggaccgcttttttatttggactttaatcgcctaaacgtgttctataagtcatatccttccggttaaccctgaatggcaaacgattgcttgaagcaatccttcaccattctgtgttaatcctcaggatatacccgacttatgccacactctcattttttaatgctcagaccgtttcggttgtgacgcactctttttgaaacgtgctttcacaaccactttattccgcttaacgccgaaattagcgtccatgcgcgcccctgattgcccgatgtaaaacgggatgcaaacccgttcaataaccacaatacaactgctccgcgaccatttaatccagcatcccgataacgccgtacactaagcgccaacgttggaataaacgtgagtactccaagcaatccgataacgattatgtacagcactaatgcaccgctcatcttcagttgcacctttgcagcttgtgcaaatagcaaagcgaaaaatggcatgaaccaaacaatcattaaaatcaacatcgcccaccaataacccgcacgtgttgttcgccccgtaaaatcaaaataacctttaaaataatctcgccaagctgacttaaacgttacttgccctggtgtttcttgaatctcgcgcattgtgaatccccttccaaaactgattaacttaattgtaccgcatttcaccactaatttgatacaataaagaaaatcaacttggaggaattcctatgaaaatttatttcgcaaacgctctattctcagcagcagactttgattataacgctaaggttgttgctcaactgcgccaatcgattcctggtgtcgatatctatctcccacaagaaaacgccgcaattaatgacaagaatgcttatgccagctctgaaatgatcgcacaagccgatacagacgaactcgttgctagcgatctcgtcattgctgttttggatggtcccaccatcgatgttggcgttgctagtgaaatcggtgtggcatacggtcgccaaattccaatgatcggattatacaccgacagccgccaacaaggtgctacaaatccgcaaaaactagcagctttacaagagatcgccgaaaaccaattccattacttaaacctttacacaaccggcttaattaaacaaaacggcacgattgtgaataatgtagacgcgttgattgaggcagtgcaagcccacgcctaattaaaaataaagccattcatttgttatctataatgaatggctatttatattgtattttgagcataaaaaaaaggattcaagctttgatatgcttgaatcccctaggttgaggttgatagcttggttgttacgagctgattctgttttacattctggataatgttacacctcatacttctattcaattgtttttaatcgttggtctagcccactgctaatcgtttcactcgatctagtttggtcgtctatctttgacccgcatgtgcagttttagcgatgacgattaaattcgtgtttactacttgagcgatattctttaacagacatcagcctccgatatacttagatcttaatactacgaagagttacacttatgtttccattggaaccacgccttgcaatttctttttcgtactttaaatcttgatgtgtcgtacattcaaatctggtgcttgtgttttaaagtggtaaatctatttaaagctaacttggtttcacttgccaagctatctttcctcaccattaatatagcaccttctgtgaccggatacaatcaaaatgctcttaaatttaaaaaagtttttccatcatttctgacttgttatttttatcagaaatagctaaaaaaactgccattaacaatactgttaatggcagtttttaggatacatagctgtttttttattaatctctaacttgataattgcgttcgtgttccttaacaccttttaaaatgattggcgcgttgtccattgccaaatcaatttcatattcgctaccgtcttctggtagttctgcttggaattgattttcgtattcagccatcgtcaattgacgtcgtgcagcaagcattgctttgtggtccgcaccggctaattgtttttcaaatccaggttgcaaaataccggtgaagaattcactgattgcacctgaaccgtaactgaataaaccaattcgatcgccggctgccaattgcgttgattgttccaacaatgaaaggaagcctaggtataacgcgccagtatagatattaccaatttgacggctatacaatgtactttcttgataacggtctaataaatgtgcttgttctgcttccgttgcttctggcaagattgtccgcaatgccttcaagcccatctttgtgtatggtaaatggaacgttaaggctttgaaatctgagattgtgcggccagtttgagcgcgatagtctgcccaagttgcttggaaaaattcgatgtattgttcagttgaatatttgccacgcgcaaaagcttcttttgaataattagggcgccagaaatcttgaatatcatcactgtggatggccgttgccggttctaacgccaacaaacgtggtgctgcactaacgatcattgcaaccgcgccggcaccttgtgtcacttcacctggtgtatccaaaccgtaacgggcaatgtcagaaccgatgactaatgctctttgctctggatgtgccgctacaaagtcataagcggtcatcaaaccagcggttgccccgtaacaagcttctttaatttcaaaagcacgggcattttttaatcctaataagcgttgtacataaagggcaccggcttttgactgatcgattcctgattcagtgcctaaaattaataaaccaattgaatcacgattatcatcatccaacacttcaagagccgcgttagccgccattgtgacactgtcttgactgaggggggcaattgccatttgattttgaccaatcccaattgtgtatttgtcaggatcaacgcctcgcgcgttagctagcatcactaaatctaagtaggtattaggcgtaaaaaggcccatcttatcaattccgatttgcataataaacttccaatctatttgttttcagcacgcagttgcgctaacagctcggtggctgttgctgtatttaaatgtgtcgctttcaataataatggtaataattgcgttaattcagtctcggttgcgccaacggcaatcgccaacgacttcgcttgaagcgccatgtgtcctttttgaatcccgtctgacacaagtgctttgagcgcggcaaaattttgtgctaagccaacagctgcgataatgccggctaattcacgcgcattctgaacttttaacaagcactgattaatctgcacggttggtagaatatcaatcgatccgccaaccatcccaactggcagtggcagttcgattcgaccgcgtagttgctgatcagttgtccattcccaactcgaaagcggttggtaagcaccctttctagcagcataactatgcacgccggcttcaattgcgcgccaatcgttgcccgtcgctaacaccactgcatcgatgccgttcataatccctttattgtgggttgctgcgcgcgccacatccactttggcaaagtcactcgccgcaatcatcttttcggcaattgttttgccagcaagcgtcgcagttgttaaggtagctggatcaatcgtcacacttgcggtcaccacggattcaaacgcggcattggtcaaaacactcaataaaagggtgccgcccaactgttcttgaacagcatgtgcgatcgcttcacagattgtgttcacaatgttggcacccatcgcttctttggtatcaatttgcaattcaagtttcaaaaagcggtcgtcaataatcgtcggcgtgattttttgaagaccaccaccgcgtttaacaattgatggatgcgcagcccgtgcaacttcaaataaatggtcattgttgccactaatccaagctttagccgctactaagtcaactagcttctctaacacgacttcaccagtcatcagccgcgtcagttgttcagtcacaaagccgccattagctcgtgccatcttagccgcattattagccgccgcgataacggatggttcttcgatcgcaaacgggacttgatagacttgctgattgactaataaatcttgcaccacaccaagcggtacttggtactggccaatttggttttcaatcatattaccagcgatctcatctgacaagggttctgcagccgctaaacaatcagcatccgtctgacttaggtgaccttgttcaacaagcgttgctaaacgttcatccttcgttaattgatagaacttaggctttttcattacaccatgcctcatttaattgaatttcaaaagcaattcctaacccgccaccaatacataacgaagcaatccctgttgtttggtgcgtccgtttcaattggtgcattaacgttgtcatgatgcgcgtgcctgaagcaccgattggatggcccaacgcaatagcgccaccggccacattaactttagcaggatcgacttgtaacccattttgaacggccacacttgaagcggcaaacgcttcgttaatttctaataaatcgatatcggctaatgtttgattttgttgcgctaataatttttgaattgcatcgaccggcgtgtaccccatgtaatctggatcagcaccgacttcttgatagccgaccaaagtggcttggtaaactaatccgagtgcagcagctttttccttgctcataacgatcatggcagaagcgccatcgttaatgccggaagcattggcaggtgttacagtcccatcttgttgaaaagctgggcgcaacttcgccattgcttcgatggttgtcgttgggcggataccttcatcttgttgcacttcaagcgttgctttgcgttgttgcaccgttacaggcacgatttcttcattaaaccaaccagcttgggtcgcttgcgcggctttttgatgagaagcgagtgcaaaagcgtcttgcatttcacgcgtaacgccgtatttagctgctacattttcgcctgtaatccccattggctggtgcgtaaacgcatcgtttaacccttcgctactgatgctatcaatcattgtttgatccccaaatttactaccaaaacgcatttgtttattcaaataaggcgcttgtgacatactttctgtaccgccaactaagacgatgtcagcatcgcccatgacgattgcactctgcgccaaccgaattgcttttaggccggagccacaaacttcattaactgtcattgctgtgcttgattgtgtcatcccactcttcaaagcgatttgccgtgcaacgttttgcccagaaccggcttgtaagacattcccgaaaattgcttgatcaatctgagttggatcaatcccggctgcttcaatcgccgctttagcagcaactgtccccaattcaaccgcgcttaaacttgcaagttggccccccaatttaccaatcggtgtccgctttgcactgataataaccacttcttgcataatatccctcttcatctataagtctaattattactataactaaattttcttgaaacgtctggtaattcataatttctttaactttttttagaaatccgcttggtaagctgagattattttaccattttatcggcatcgtgcattactcattagcgtaagtcattcaccggtgacgcttacaactaatctttaggaggaatccacatgcaaacatcatggttagcaacatcgatcgcttttgaattacaaaatacagactatccaaatgaaagtttacaacgtcgtatgaccgccgtaaaagaagacgttcaagccacggaaatccaagcagttggcgaagccctcgcaagtctccacgcaggtgacacatttgcaacagctactctaaccactaaatccgcttatatcgctaaataaaaaacataccaatatttgaggaggaattcaagatgaaacaactttgcttagaatttaaaaacagtgatgctaagagtcgtgtattgcgcttaaacaatattgatgacaacttagacgccgaaacagttagaagtgcgatgactaaaatcgcagcagccaatatgtttattaaaaaaggaattgaactctacaaagaaccagttggtgccaaatacgttgaacagattgaaacaccaatcttttctgacaaataattaagcagcatacagcccccaaatcgaatctgatttgggggctttttttgcgttttacataaattgattaacaccccttgtttccgcgataaactttggtgtaggcttacataaagtcgttcaaaggagttatcatgcccaattcatttaacttatcgcaaatattgcaatcaatgttgcttaattgtttactggtaattgcgctaccactagcttttgccgggattttaacactaatcaatcgttcaactaaacggcgcttagcccattggtgggattactcacaacttttaattggcggcctaggcactgtgattcatgaactcagccatgctgttgcctgtttaatcttccaacaccaaattatcgatatgcaactcttaaaattaaatctacgggataatcccgatcactcgcttggccatgtcaatcaccgataccattccggccgtctttggccaacaattggtaatctctggattgggattgccccgatttttggttgttcagccgccattttcggactgacttggttattagcacggcccacttttgcaacgtggatgacctttgctgaacatcccacttggcagttaaacgccatcggccccttgttcagccagctctggacgacgcaaccgagtgctctcttgctctggttaatcttaactagcatgattgccatcggtggttttgacttatccgcagctgattttaaaggcacgattccagggattattgccacagtcatcgcggtctgcctcgttactggtctgttttcatttgtgccaacagtcaacaccacgacttggctcattggtattctaacaccaatggcaattatcctaaccatcgccgctagcttgtcgggtgtttgttggctgattattgccgggattttcgcactattagaaaggacgacttatcatgcgcgtcattgacttactacagctattagctgatacacccaaaaacgatggcatctacttcgaaggccctgaagagctccaacctatcacccactttgagctcgccgtcgttgacgaacagccacgactattactgcagttaaaggccgcagacaaaaagccgctgaagcagtgggaatttagcctattattaaatcaaaaaaactactaccaacattatatgtatgtccaaacaaagacgggggactatcctttgtttggttttcgcgttgctgctgacaaaattctactcggataatgtttgttcaagttgcgttaaataacgatgactcgcaatcatttctcgtgcatcattttgatcggctaattgaatctcatagatcgaactggcatcaggatttaacaatggcaatacgcggacccagtcaattttgccagtccctaattgcaacccatcatgcttcaaacccatcgaatcaaccagatgataatgaacaacgtgctcacgcaaagttgacagactctgcaagaaagcattctgatcaccctgcaacttgataaaacaatgactcgtatcaaacgctaagcggtaacctttatcaaagatggcctgatcaaaaatctgattgccataatagaaaatcgatgaaattgaattttcgaacataatattttgtccaccaatccgctgtaaataatcgaggcgcttgaacaaaacacgaatggcatccgtaatattaccgtaacccgtcgtcaattcttcaattggatcatcataagagccatgcaccaataattggacatcttcagctttcgctaactgcaataaatcgagtgttgattgccataaaaagcggtatcgggctggcgaacttgcttcattcatcgacagttcaatatgatgcccttcgaaactcattgggtggtgtaaaataattcgttcaacctgctgactgcgtacataacgaattttttcgcgtaagcgtactagcccagttggcgtgacatcttcggctgttaaatgaaattcaaaatacgttggctgatactgcattcgatcagcaatttgctgatcgttaatccctgcttttaagcctaatcgcatcgtaatccctcttttctctactagttcctatttctattctaacattctaaagacctaagaatcgtaaaagcggctcaccaagtaatggtgggccgcttttttggttggcgttaaacgtgctttttgaaacgcacgctatgcatttagtaccttgttcaggaagtcttttgttctttcgttttgtggggtgtcaaagatttcctgtggtgtgccttgttcgacaatgtgtccatctgccatgaagatgacgcggtcggccacttctttggcaaagcccatttcgtgagtcacgacaaccatcgtcatcccttctttggctaaccgcttcataacggccaacacgtcgccgaccatttcaggatcgagcgctgatgttggttcgtcgaacaagagaatatcaggtttcatcgctaaggcacgcgcaatggcgacccgttgtttttgcccacctgacaaggattggggttttgcatcgaatttctctgataaaccaaccgtttcaagtagtttcttggcggtttcttttgcttctgccggcgtcattttaccgagttccactggtgcgagtgtaatattttcagcgaccgttagatttttgaaaagattaaagtgttggaataccatcccgattttttcgcgaatttgattcaaatcactcttaggatcactgaggttgtacccatcaacgataatctcaccactcgtgggttcttctaagcgattcaagcagcgcaagaacgtgctctttcctgaacctgaggggccgatcatgacaaccacttcattatcaccgaccgttaagtccaaatcttttaacacttcgttactgccgtaattcttaataagatgagacacttcaattctattcattagttatctattctcccctcaatgtacttcgataaccacgtgagtaacgtgataacgatcagatagattaaggcaatcattgcccagattttgaacccttcaaggttgcgggcgatgataattttacccgtctgtgtcaattcgagaatcccgatgattgataaaattgacgtatctttcaatgtgatgatgaattggttaatgaaggatggaatcataatgcggatcccttgtggtaacacaacgcgccgcattgctttaccatatggtaaccctaaactccgcgctgcttccatttgtccggtgctaaccgcgccaatgccccctttgacaaaggctgcagtataagccccttcattgaacatcagcgtgatgaccccagccacaatcgctggaatcttctgcccagttaaacttggaatcccagtatagatgaataatgcaagcaccaagaggggtaacccacggaaaatatagatgaccgtatctgaaacgccacgcgcaaaccggttaggtaatacgccgagtaatccgaagaaaaccccgaaaatcgttgcgaagaaaatcgcaatgactgttaataataacgtctggcctaaaccgctcaacaacgcatctttattttctttcaataatccaaaaaagctgtgatcaacggttgcttttttagttgattctgtacttaaatattttgctttaattttgtcgtattgaccatttgcttttaatttagcaagacctttattgaatttagcgatgagttcaggattgctccctttcttaacggcaaatccatattcgccaccttgagcaggtttggtgacaatcttgagtttcaagcccgtcttaatcccatattgcataacgggctcgtcttcaaaacaggctgccgaattaccattcacaacatcattatacatattatctgaatcatcaaacgtaacggtggtaaagccatattctttcgctttggccgtcgcataggccccagcggcagtccctgttttaatcgcaacacgtttaccgcgcaacccttctaagcctttaatcttactgtccttttgaacggccattacaaccccggtcttgtagtaaggatcagcgaaatcgaattttgcttgccgttcaggtgtaattgtcatcccggcaatcacgccgtcaatttgttccgactgaacggcttgaaccgctgcgttgaatcccaacggtttaatattcactttaaagccctcggacttcgcaactgccttcatgatatcaatatcaataccgacatattgattcttctcattcgcaaactcgaatggtggataggtcacatccgtaccgatttcataagttttttcagcggcttgaacctgattattcacttgactcccaaatacaaataagcctgcgagtaaacagctgcctaaaaatacgagtaatttcttcatgtgatcctcccctaatgcctgaccaacttctctcatcgctcttaacgcgttattaagattagattagacgttttataatagtatgttaataattataagcataaaatccaaatttgtcgaattttttaccacaatattgaaaagcagactctaatccctaaataatcgcattaaaaaagcccgcagataaggcggactttcactaaatgaaaattgaatgagtttattttctgctataatggaagaactactactcaaggagtctactatgattaaacccattatgcgtgacactcaattcttagctcaaaaagcagttccagcaacaccagctgataccgatgtgctgaccgatttacgtgatactttacaagccaacacagaacgttgcgtcggaatggctgccaacatgattggcatcaataaacggattatcatcgttcaaatgggcgtcttacctgtgattcttgtgaatccacagattgtgcgccaagccaaaccttatcaaacgactgaaggctgcctctcattgaccggtgaacgtccgacaacccgttatgaaacaattgaggtcacttaccaagaccaatcctttaagccgcacaagcaggctttctcaggctggattgcacagattattcaacatgaggtggatcactgcgaagggcttatcatttaaaacaacaaaaaacgttcaaccactccaatgtacggagtggttgaacgttttttacaggttatttattttcttttttagggtctttttttaattcttctgccaagtcgataatgtatttcttcaagtcatctttgacttctgggtgttttaacccatattcgatacttgtttctagataaccgaacttgttcccaacatcgtaacgacggcctttgaattcgtgagcgaagacgcgttgggtcttgttcaattcatcgatcgcatcggttaattgaatttcaccaccaagccctggtttttggttttctaaaatatcaaaaatttcaggcgttaacaggtaacgaccaatgattgctaaatcactaggtgccttatcaacagctggtttttcaacgaagttcttaacgttgtataaatcgtctttaactttgttttctgggttaatcacgccgtatttgtccacttcattatgtggcaccttcataacggctaattgtgatgcatgtgtttcttcatattcattgattagttgtttactcaatggcaccttatcttccatcaagtcatcacctaacataacgacaaaaggttcgtcagcaacgaatgattttgcaaggcgcactgcatcccctaatccgtttggatgtgattggcgaatgaagtacaagttaacccccatatcagtcgtttcgttgaccatcttcaacatagcggtcttattcttggctttcaagttttgttccaactctggtactgaatcaaagtgatcttcaattgggcgtttgcccttaccagtgataattaagatatcttcaatccctgaagcctttgcttcttccacgataaattgaatcgttggtttatcaacaattggcaacatttccttcgccattgctttggtagctggtaaaaaacgagtgcccaatccggctgctggaataactgctttacgtactttcatctgctaaaatcccccataacttatagtctaataacagtatgccataaaaaagtggatttgcaccaattatatgccgaaaatgaggaaaagattaacaagcacttaggattttatcaatcttttcacaattgttttgtaagcgattcccataattggtattctcaagatgttaacaataaaggaggtcttcgatgtttctactacatcccaaacatatcaatacatatcacgagtgtcttcctgtgccactcatcatcaaacgtggcattgattataacttctgtgagctggatcaatcgtcaattccccgttcttaccaaactagtattacgagtgacacaatggtgattattccctataaaaaatcgcaaagtcttgtgttagaccgcataaccggtctccaaattagtccgcgttctacccggcaactaatgcgcgcttataatcgccatcagatcatggacttctcacaaccccggtacctttgccattgcttcaattggcatcggaaaataccacatattaatggcgaatatcagtatttaccgttaagcggtactacccatcaaaatgcaccctggctagcactacattatgtccgcgattatgaggttagcgataaccatctctacgtgacattgctaaatgactgtacctgtatcctcccttacaaaggccgtcaaatcgatactgaaattcatcaatgtgcagccattggcaaagtccaacttggctgtctcactgtgtgtgccactaatttcggctatcaaatcaagctcaagacttgtttcaagccaagcatcgtccatcgcttcgatgattgccactgccatctgtgctcgaatgttccgaaaacagctactgaactactcggattactcaacgcacttaaaatgcataaggaaaatttcatttaccaagccgtaatccatgaataccccgaattcagcgtatttgacattcagtgctatatcaaaagtgttaaagcactaattcaaaaattacgccaattataaattaacccgaagtcgctatttacaatagttttcatttgtatttcaatgcatttgcgcaaattaaagctgaaacggattgatttaccgctaaaatcggcgattacccttccttatgcaaacccgctatagtgaacttaccggtaattcacactgtgagctcatagtagacaggatgctttccaatgacccaatcagatttacaaactgcctttgattttattatacaagacgacaccctcatctatggtgttctcaaagatctccacgttccaagacagcgtagcaacttcgccgatctctaccaaattggcgtgcttgcctttgtcgaagcctacgatcatttcccgggcaatattgaagtcgaaacccaccgcttcatggtttacgcttatcaggccgttaaatgggccattatgatgactttccgcaaggataataatcgtgacaaacgaattggcttcgttaaccggacaaacgatgatgattccgtgatggactatctcgaccaagttgctgatccctactgcaatccagaagaggccgccatctgtaacgacctcttcgagcgtctctatcaagtctgtacaccacgcgaaaaacgcttcttagtcctccgctacttctacaacgccaccctaaaagaaatcgccgcggatctaaacatcacacggcgaacggctaataatattaagtttaaggttcaggggaagtttggtaagctacttgtatagcacaaaaacggatgctctaattacagacagagcatccgtttttgtgttatattgcttacttactttgatagtattcctaccagttcttatttattatcctgcgaaattgcactgcgtagctgggtactacttgtcgattttgtatatggaaaataaacaatttcaacatcgtctaacttactgaattgttcttcataacgttgaaatctttcggttccttcataatctgatccgacaaacagataattatatggaataatttctcttacatcgctatcctccggaagtgatacaattacctcatcaacatatcttatgcttcttacgatttccattcgttcttctaatggaatgaaaacagctttattcttatgactagcatccttatgaacaccaacaactaaataatcacaatactgttttgctttctttaacatattcaaatgtccaatatgaaaaagatcaaatgtcccactcatgtagccaattttgatttgtggtttttctgttagtcgattacctgcaattttataatccacaacttaattctaaattgtggtttctaaatattaacgacactttttacaccatgattgatttcgaataacgttatttcccatatctcgccacccaaattcacttattggcttctctatctgacactttgggcaaatcctggtaggttcttttccattataacctgtagtattaacctctgtctttttaaattcttggttcatctatttcgccacctaactcaactatgaaattatccataatttgtatattcttttcgtctgttaaatattcatagatcgaatcaaagatatcttcttctttgtctccatattgaaagataatctcatctacatattcaataccgcccaaaaagtattgatagaatgtggatacatttggtagttcaatatatcgctctccatttgtattctttaagaaagccttcttatttagaacttgtgtatatgattcattcaaactatcgatgatcgtcaataggccaaaatctcgatccatctcaaccattgttttttgatagactgttctagataaagttcttttttgtgactcatctttaccatagtcgttcaacgctatcttactattgttgtttattccaaataaagctgttagaaactggattttttctcccgataatctatgattacttaaaaagttatcatcacgagtatacttttcagtttgataataaaaagaaaaatcagttgggttcatcatattattactcatttatatcatcatcctcatttatatactcttcgacatcattagcatcaattatccgcgacacaacatttccaaccgtatctttagataactcatatacacaagaaatattactgcgaataccagcaatcaactcattccgaagctgtgccttaaaagataaaaagattaactgatcaaacgaatttagtattctcatactgatttgtttaatatgttcttcatctaaatttgagagtgctgcatccataataaccccgctactttggatatcatcgaactctgagtgttgttcaatcgtcatcaatagtgctcttaaaaatgacaagtacatcattacattttgacccgtggacagcacctcagtctcatcttttaaataattcttattatttctcttgtagaccgtcaatttatattctgaatccaattctacctcgtagtgttgatccattacctctgaaagaaccagattcatgttccttttgatcgattgtcgggcaatttttttcttattatccagttctccttcaatctctaacttcagttggttcagcattgtcaatgatgccttcacatttctattatgttgattactaaaatggattttctttaatcttgagctgagtccattaataatcctttgattctcctctaccgcctctttattagtatcaatactgtagagaattcgtgctttattagccctaagatgctcaatatttacctgagcattttgaccattctttttctctttatcgattactttttcaaccgctacatcatacgattttcttaattcttcaagatctttttttgctaagactaattgtttatgataacgttccaccttatttcgcaatattgaaatatcggttattgaattatacaaactctttaaggcgtttaaatagtttgcattatcttgtggtagcactgaaagagatcttaatatgtctgcttcatgactattcgagtgaacttctcgaccacaaatacattcatgtctctttaatatatccttgattacagactcatacagattctcaaaaacctcggcctgatcttcttccttttcaataaattctttatatttaggatacgtttttgcaatttctagtttaagtaaaagattgacagcacaatcatttgcacttttcgttagagattctattttttgttcttgcttatttatttttaaatccgcaacttgtctctcttgaactaatatcctaagttcatcgatacttttctgcgcttccgtggcttcatcaatatctctagttagtatttcaacagagccttgttgtaatacaatctcatgatttaaatcatctatattcttctttgcaatattatctctatctaagacttcctgctcggtattatttaatggcatcaatttagaataaacttgtccaatcactgaactcgatttagattcatctcccaaaaaatctcttgcttgttcaagtttcttaagtcctagtacaccaactattgaattctttaaatcgtttttaaattctttgctcccaattggcttttcaacacgttccccatcaaacatgtaaacatgtgccaatccagtaggtatcatttcctgaattctttttagtccatcttcaacttttactgcaccgcgattttctgtttcttcccataattcaaagctatcgtctgaattttttgtaagtttttgcattttacggttaaacattctaaatctaactgttctaaccgctatataatctttaccgttatgttgaaacttaacttgtaccgaaagtggctgctcatccatttcactcatatcattttctactgagtaatttaataattcctcactcttaggtaattttaaaacatttggactttccccataaaagcaaaaacggaacgcttgtaaaaaagttgttttcccaacaccgttacgagcaatgattaacgtgatttttcgatcatttatcgggaacacaaatctattttcgcctttgaattgtctgaaattaatcagttttagttctttaaaaatcatatttctttcccaccaatctaaccactttatcaactttatcccttacagatatttttacaccttcatttatatactcctcagccacttttaaaagaagttctttagtttcgtctaatttctcgtaatctactgtattttcattttcttcattcatcttctttttcctccaaatatctatcgaacaattcttgatattcatttaagatttcatttttattttttgcagcctttgaaaattctgctactcgtttcaattctgtcatatttattccatcataatcggattcctctcccaaaacgaccatatcataaataacggcaatctcttttcctgcagattttcttaataatcgacctcttcgttgtataaattcacgcggatttccagaactcgccataataatacctattgatatttctggaatatcgaccccttcatctaatgccttaatagccactaaagtatctattacaccacttttgaatgcatcaattctatcttgtcgctcgttaccactctcatctttagtatattgagcagctagaattcctttaccctttaacatctgatttacaatttcaatttgttttttacttgcctcagtattactctgatctaattcatttccctcagtatttccaacaatcccttcagacaacgaggtagctccacagtagatcagcatatttttttgattttttaaattatcaagtaacgattccaacttaattattttgtcatatgcaccataaataattctcgctctcttaaagagtaacatctgtgcttcaagtgacaacccatctagattattttcgtcatcactacctaacatctgcactattttatgcgtcaactctttgtacttttccatttcatcatcagacagtctaactttaacaggatggtactcatattgtgttagttttccgtcctctattgctttttccaaactatattcagctagaatgcctccaaaatagttaaacaaacgccctgttttttcttcagacatataaatagtcggcgttgctgaaagtcctagtcgtctttccacactaggcaggctattcaataagttatcggttcctagacgatggcattcatccgctaaaaaaatgtagtctttatttagtttcttaatttgacgcatgaatttttcaccatggaatgtttgattagtcgttacgataaataagggttcatccggttcaagtttccaatagtctattttattttttaattgattaacccactggttgttttcagaataacatttcactaaattaccccagtaattcaacaactctttagaccattgctctactaacgttttatcaggaaccgtaattaagaaaacttttggtccttcttttttcattaattgatcgaacgcataaatagcagtttttgttttaccggttcctgttgcaaatgcaataatccccttatttttttcaatccacttctctgctgcaactttttgataatcaaacggcttgaatcctaacttttcagtctcattctttttttctaacccaccatgtctacttagtttagaatataacgtttttatactttcatccgtttcatattcacgaagtacatcgtcatctactgcctcttgtaatgacagcatgtggtattcgttaaggttaccttgccaagtatcctcaaattgttccttaaatgtatcgatgtacaactcttgtccgttgatccaggatctaaacgtactaaacgattctaaattgtgctctacagagccttgggtttcattattagagccatttgttgcgatcgcatctcctaattcatcataaaataaagcaattttttcatgaaataaccctaagctattattgggaacgattattcttatttctaatatattattcttaattaattgatgtagaatctgagcagaaatatttgcgtcatttccacctaatctaaaacttctaaataattcattaagcgattctgtaatagaatccagtctattaatagaatctaaaaatacttctccatctttcttagttacaaacggtgagataactaggcgcattttcccgttattttctacaaatttctctaatccatcaatatacgctattaaaatattagatgaaaaatatccaactgccctatcataacgtacagctttacttaagactggcacataaaattcatctattacttggttgaccgttgttcgatattgtatttttaagttttttaaatcggtactaaacataccgtagccctccgaatatcatatcataaattaatcactaactattttattagtgttattgtaccgcattagcattttattcactaccgttatagttgttattcttcacctattttcgatcaaaaatggctagattaatcacaataattaacctagccaataaatataatagtcattctattcttcctattctttctttttttaaatcggatactcttcttattgctatatttaaatagtattctgaattatctattccgatcgtttttaccccattttttgcacctgcaaccgcagttgttcctgaacccacgaaaggatctaataatatcatcccagtgtcagtacttgcttggaccatcctatcaataacagccaatggtttttgagttggatgtcttccgaatcgacgctcactattattaatagtgggtgtagtccaaacatccctcatctgcctactatgatttaattctttcattaaatcataattaaagaattgttttccactctctttttttgcccaaataatagtttcagttgaatgtgtgaacatcctcttacttaaattaggagctgggttggacttttgccaagtaatattatttaatatcttaaatccatattttggcaataaataccctaatatgtatatattatgcatcgacccaaatacccatattgtgccatctttttttaaaattcgatccgcagatcgaataagtcttgtataaaatacctcaggctttacatcattaattttatcccactctcctttgttgacgctaaccatcttacctccactattcgaaaaacccccgttacttaaaaagtatggaggatcagcaataattacatccactgaattcgaggggaatctttgcatacactcaaacgtatcactacagatcaatttaactagctcatctttgtaaacttgtttcataataatcaccacctattaaacctatacacattactgtttcatttttttcacacttaagaaatttatttttgaggtgccctgtcttaccaatactattaaagaacattagaatttaaatgaagaaacaaagtccttcaggtctcgaataacactattaaatccccctattttggtgtatcattatacaaacatacgttttatatagaggtgaaaaaaatgaataagaacccacttgttaagccatttgtgaagtgggctggtggtaaacgtcaattaatcccccaaataacaaagtatatgccaaaaaaatttggaagatactacgaaccttttataggtggaggagctgtattcttcgaactacaatatggaaaatctacaattaatgactttaatactgaactcttccttgcatataatgctgtcagagataatatcgacgaattaattagcaacttaaaaattcacgaagcaaataccagtagcgactattattatgaagttcgtgagtgggatagaaatggaattattgataccaaatcaaatgttgaacgtgctgctcgttttatatttttaaataaaaccggatttaacggactattcagagttaatagtcaaaatcaaattaacacgccctatggtaaatataaaaatccagcaatcgtcaacgaaccagttctaagagccgtaagtaaatttttaaataaatcaactatcaaaattatcaatggtgattttgaagatgctgttaagggagcacgacggggcgattttgtatattttgatcctccctatgctccaatggttaatgatcgacaaagctttgtaggctacacactaaatggttttggcgcagatgaacaagaacgtttacgagatcttgtagatcgtctgactgccaaaggtgttaaagtgatgctcagtaactcctctgtcccttatatccatgaaatttatgctgattataaagatacaactgtaattgtgccggcatctcgcagtataaattcaaaagcaacaggcagaggtaaggtggatgaagttttaatcatgaactataactaccttgatgaaaattaatctaatagagggattcttatgacaaaagcaagtgacgcttggactcaactatttgataaatacaatattcttgaacaaatagacgctgatggtgtctttaatatctccgctacacaaatcaaagaattctacgagcctagactcatcacaaaatatgattggtcatctagtttacctgacttatttaagaaaaataaattagttatattaccttcctcacgtggaacatatacaatcggtagatttaaagcctaccagaagctgaattatgagaatatacgaccaatcgttaaaacactcccctcttgggtaagtacttgggactcattcggtatcacatcagaagcagtagctttaaatgtcgcaaaagcctcaggaatgatcgaccacatattaatgagcgatcaaaacttccctgctatcgacaccataacgggccgcttaaaatctggtgatttaaattataaaattgagcaaaaaaatggctccttatatgatttccatgttgccaatgcccaagtagagattgacgcaggcttcgagagccttgataaactagccattgttgaggcaaaaactcacatacctgaagatttcattattcgtcaactttatcatccttatcgtgtctacaatgctttgggaacacaaaaaccagtcattcctttatatttcacttatgctgatgagatatataccttttatcaatatgagttcactaatgtaaacaattactcctctattaaaaaagttcgacaatactcttttatattaaatcaaactctaagcttaaatttagatgtagtaaaacagatatctgtccaaagccccatgcatccagaatcaacagaaatcgtgtaccctcaagctaatacgtttcaaacagttttagacatgatgcagtatttagctactccaatcgataaaaatgatcttgctgaaaaattcaactttgatgttcggcaaagtgattactatgcaaattcattaagattcttgggattagcacaaaaagaacatcgtaagtacgtcctgacagatctaggtcaatcaattaatagtttacctaattccgacttccgtaacgaaaaaatcattagacagatactcagtcatatcacttttaaactggtatttgattcttatttaaaaaataatggtgaatctgacgatgcttatattgatagtgtactcgcagaatatgtacccaatattagtggaaaaactattcctcgtagacgtagtacagtcaagcaatggattagttggattttttcagtaatctactaacactcattaatcaaaaaaagaaggtctcaaacaaatcatatccgatttgtttgagaccttctttctattattccttcgtatacttcatcccacctacaagcatgtctgttagcgcattacccgtagattcgattttgaaggattttttgtctttagcaagttcggctgtgatttcggtgtcattgagtttaattttcaagtcgccgtctttgatttcgtaggtacctttgccggttttttcattactttgatactctgtaactgtgtcatctttgaagacaaatgtatcttttgaaacgcctaagttagcggtgtagcgacctgctaattatttttgtacagttaaactagcggattttcatccaccgccggcaagtatctgccagccaatccggcaattaccgttagcaagccaacgctaatcaggccggccaagtgaatcaactgactggttgtgtcagacattgcgacgctgccactgatttgggcaatcacggccgttatgtcttgttgccgcattacggctaggcccatcaagccggtgatcaagataaattgcattaggatactaccgagatacgtattccgatatttaataattaaggtttgggccggcgtcgtgacgccggtgtaataagcgcgatgatttaaaagaatgctgttggcactgccaaagaaactaatcaataagatgcctaataaaattagatgtggcgtaatcatcaaccacgcaccagcaacaaatcctagtaattggacttttaagtctgataacttcgaaaagcgcccttgcacgctctttctaataacttgggctaaaatcatccctgcaccgtaagtcacgtaggcgcctatcatcaaactctgattttgaattgcgacaaaaatatagagcattaagaatgtttcaaacgccccgttaattaaagccgcaaccaaaagccaacccggcatcttcgttttagtgccgcgcgtgatgatcacccgcaagattagcgcgactaacccaatgacagcgactgtgattaataaccagacaaatttagcttcaaaaaggcgcagatatcttagcgcaaacgccatcgcggttgcccagacaaatagttccaagttattaagcgatttggtttgttcgacgaacaccgattcatcaagttgcttcacaaacggttcgaagcgttgcatgccaatgaaaccaatcaatacaaatagcatgataacaataaagactaaccgatatgaaaaatgactagcgatggtcaacagaccaaccgttattaggctaaaagccaataacgttttaatttcagtgcccataaggtgccatttccaaaccactcgctcgtgataataaacgccctcataggtcggcatgattacactggcgctggcccccaagataaaagccgccatatcggttagatacaaccacggcgaaatggccaataacaataaggcaccagcagctagcagcatactgatactagttattttaaatgaattctgcacgtggcctagactattcacgaataataagccagttttcaacgcggtatagaataagatatacggcatataagacgccactgactgcccgctatgaatcatggttaagccaattaaagggagaatttgaattaacttcgccaccgcaaagacaatcccttgtttaattttttcactagtcgctaattgttgcccatttgtcatcaatcatccctactttcattgattagacggtaccttatattgcgtctgatttcaaagaagtaccgttaaaagcctaaattgattgcacaaaaaaaaacaccgtaagtcgtcgaaacgacttgcggtgttttgattaggattttattcccattccactgttgaaggtggcttgctcgtaatatcgtacacgatgcggttgacgtgatcgacttcgttaacgattcgcacagaaaccttttgcaagatatcccatggaatccgtgagaagtcagctgtcatgccgtcgattgagttaacagcacgaatcccaactgtgtagtcgtatgtccggccatcacccatgacacccacactacggatgcctggtaaaactgtaaagtattgccatacagttttatctaagccagcgagtgcaaattcttcacggagaattaaatcactatcacggacaatctttaatttgtcttcagtgacttcaccaaggacccgaatcccaaggccagggcctgggaatggttggcgccatacgagttcatatggcatgcctagtttttcaccaaggtcacggacttcatctttaaataatgtatttaaaggttcaattaagctaaattgcatgtcttctggtaaaccaccaacgttatgatgtgatttgatggttgtcgcagtacttgtaccactttcgataatgtcagtgtataaagtcccttgcgctaagaaatcaattccgtttaacttagttgcttcttcgtcgaacacttggataaattcgttaccaataatcttccgtttcttttctggatcagaaacgccagcgagtttactcatgaaacggtctttagcgtccacttggatgatgttcaacccaaatttaccgccaagactttccatcacttgttcaacttcgccttttctgagtaagccgtgatcaacaaagatgctgaccaattggtcgccaattgcgcggtgtaataacaccccaacaacagatgaatcaacgccacctgaaagaccaagaaggactttcttgtcaccgacttgttcgcgaatcttttcgatttgcatgtcgatgaaatcgttcattgtccagttgtcttgggccccacagacgtcaaatgcaaagttcttcaaaatatcgttcccgaattcagtattccgcacttcggtatggaattgaatcccataaatccgacgttcacggttttcgatggcggtgaaaggtgtattatcactttcagcaaccgttacgaaaccttctggaatcgctgtgactttgtcgccatgactcatccacaccgtttgtttttcaggaagacctttgaataagtcactgtctttgtcagtgactgtaatttcagccttaccatattcacgttctgttgatgcttcaacattcccgccgtttttaaaactgatcaactgcatcccgtaacaaatcccgagaattggaatccctagttcaaaaatttcggggtcaactgaaaaggcaccatcatcgtaaacactcattgggccaccagagaaaataattcccttaggggcgatcttcttgatttctgctgctgttgtcgtgttaggcaacaattcagagaaaatcccgaattcacggatacgacgtgtaatcaattgattatactgactaccgtaatctaatacgataatcttatcgaaatcttgcatgtccttttgggccaaacaactcactcctctttttaaaaagcaatttggtgtgaacaagtaacaccaaattgctagattcatagcactaagtcaaactataatgtatctattttactgattaataatgaaaacgtcaatggattgacggccttcctgtgaaaaaactcattctattattaatatttacgtaggaataccttatcaatcacgtgatgttttgttttatgcaaaatgacatcggcacgattacgcgttggtaagatatattcgtttaaattttgtaaattaatgtcacgccatacccgccgcgccatcttgaatgcactctgtcggtcactgatggcgtatggataatagtagttggtcggatcatctttggctaaatcgagtaatagatcgaaacgttcaaggaaccatttcttgattaagtcggcttgcgcatcgacataaattgaaaagtcgaagaagtcactgacgtaaatctgctcagttgatggcaactgtagtacgttaattccttcaacaattaaaatatctggatcgtcaatcacgtcgaactcgtcgggcacaatgtcgtaaatctgatgtgaatatttcggtgctttgactggtccaacattatttttgaccgcattcataaattgaattagatgcggcatatcataactttcgggaaagccttttttatcaagaatccctttttgtttcatcgtggctgtcggatataagaacccatcagtcgtaatcatttgaaccttcttatccgggtaggcccggctgagaaggagttgcaacaagcgcgccgtcgtactcttgccaaccgcgacgctcccagcgatgccaatgacaaatggtgtcctatgtggcttaatctctagaaattcagatttttcggcctggcgtatctggtactgttcatagtgcatctgtatcagatgccgtaatggcaaataaatatcactcacatccgcaagtgaaatccgatcattcaatccccgaatctgttccagctccgtgtccgtgatgccagtatacgcgtcaccgcggccatgaaaaacccgccactcatcacgcgagatttcataatatttcatctcgttcttcatccgacaatcctccaatactaaacgcatccattttaacattaaaaacagagtgcgtcatcttgcgattatatttcgaggattagtccagtaccatgaataagcgctatttagtagctcgccttttttctttatgaatgattatgatcagcatcccaaagttaagcaaactaatcaccgtccctattctctgaatcgtagttgttcgataataaacggtgattctaccagttcccttcaacgcaacttgtgttaacccagttcgtttattcatctgcattggtaatcgctgatgatggttgagttcggcaacgtaccctttgtaataaataaaggggacttcaacaactgctttttgatccgtcagtgtcctgaaatcaaactgataacggccccatgtatgccgtacatttgtaatttttattttatgcggctgatacttaacgacctgttttttatgtcgcaaaattttctggtagtcggtttgagcaggtaaatactcatgtccggccccaatgtaataagggttgggcgtgttataggcagcattcgttctaaagcgccaactttggctttgaatactattcgtagagtagatgacatttcctgcgcccaacaacagaattagcagataaaagtagtacttattctttaataaatgacattcatccttagcaactaagtaactcacaattgccgtaataatggcaaaaaaacgccacgggaactgaatcgtattgataattgtatgatccaacaaatgccacggcataatcgacgtcgtagctatgaatagccccaacgcaatcccaattaaatcacggtcgtttttggaatagtaaaatagaccacacgcgatgcctaatccgagtagaatcgtgataccgacattcactgtattcgcatgaaaaacagcattcgttaatgaattaacaacaatgtctttaaagggtaatgtgcggtcagataaaaatgccaggggttgtgcggttacttgaaaaatcgtggttgccatttgttctccaaccgctaagaaataacgccctaataaaccgattgctaataagccagcagcaatgagatactttaaacttttattttggtagaatctcttgagatttaataaggtataaataatgatgacaatgcccatcatttcaacagaaatcatatgactataaccaatagctgccatccctattgataacagataccaataccggtgctcacctttttttaaccgcgttagcatcacaatcattaatgggaaaaaggtgagcgcgatcacctcaccaatggcttgccgattaactaaatctgcaaaacgataagtactaagaccgtacatcaaagagaatattaatgcttgcttcttattaaaatccgctaattttcctgaaatatatgtgattaaaaacgtactaaaattaatcgcaattgcaaatacaataaaactctctttgattgatagtcctactactctcagaatagctggtaagtagagaaaagcatctgggtaaaaaagacctgccgcatagcccattccgccgatgaaaaagtaactgattctcggaaaccactctccctgtttaatcgaaagtgccaaattctcaatgcggttcatgtggaaatgatagtcagaaccagacaggattttattgggctgtaaatagacgattgcaaccatcgcaatacttaatagtccaaaaaataatagggttactgttaaggcatgtcgcctgtaaaaatactttaatctttgcatcatatactcctcataaaaatactttagtatcgataattgccattccagcatcagtctaagggggacgatcgaattataagtaagtataatataaataatgtaataatggacattatttatatataaactttaacgaatagaatcggtcaatgtacaatattttgtttggcaattaataagtaatccataagctaagaaagcgataagatgcaaaaaagcgggctaaataattattagcccgctttaaaacccattaaatttataaataaacattttaataattaaaagcgctttattaaaatattcattgtccattttctcgcgattacacttttcatccaatcaaaaaacgcccgcctttcagcgcgcgttttttctatttaattaacgtgtaatcatccgcatccacattatcaatcaatggtgacatgccacctgttgctaataaagtgaggcgatgcatcgctcttgaacagatcgtgtagagcaattgccgttgatcttcatgattgtagttagttgcgctgacttgccagccgataatcgcatcaaattccaaccctttggctaagaaacttggaacgactaacgtgcccgctgccaaacgttgattttcggaacgaattaaagttacttttgtaccactggctttcaacttagctgttaattcttgggcttgcaccaatgtcttggtgataatcgccgtcgttaacttatctgcttcatttttagcgagttgcgcattcacatcagcgaccaattgatcttcgctttggcgcacaatcaagtttggcttgtcgccttcacggttgaaagcttcaattttttgaccgccctttaagagccctttggtaaagtcggtgacttgttcagttgaccgatatgaacgcgtcaattgaacgaccttcgtattttgcgcatcaaagagttgttgcacttgttgtaataggttcgtgctgttttctttggtgaaaatcgcttggttcaaatcaccgagtaacgtgaagcgcgccttagggaagtgcatcttcaagaaggccaattcgtatggtgtgtaatcttggatttcatcgataaagacaaagcgcatgtcgcgttcgccgtgcttaccggtcattaaatcataaagatgcaagtaaggtgtcacatctgataacgtcatttgtttggcctttaaattagcgacaaaatcagtcacatgatcattccagatttctggtgtcagatcaaattcagccaaatcaaccaattgcggcacaacccgcatgaagtggacgtattgtgcttgaatactcaagaagcgattgcgttgaattcctttttgaacgggtttgaaagccttcaaaacgatttgcttagcgatatatttactttccgcttcaccagtcttaaagtccttacccgccataatttcgcggagttcctcatcacttaagttttcagcgcgttctgtcacccagtcagccttcgtttcatggtcgactttatggctcaaactgcgcaataaactttccttcgtcgcatctagccggttccctaaatgatagttttcgttgaaacggtagtagacgtcgctgatttttttcttactaatcaagaccttcccgttcactttcaaatcacggaaacgcatatcgcccttttcaaggtgcgctgcgtaacgtttaactgctttatagaagactaggctttctttcaaacggctaatccgcgcatcagtttccgtgattggtgtttcgaattggtcaaataaactctgaacagcaaggttcggcaaacgccgtgcaacatattgatagtaagtcatttgaatcatgttttgttcgccaagttcaggcaacacgtcagcgatataatcgttgaacaattggttcggcgagaacatgatcacttgactggaatccaggttaccccgataccggtaaagtaggaaggcaatccgttgtaaaatcgcggatgttttcccagaaccagcggccccttgcacgaacaataagtccgcgtcagtgttccggatgatttgattttgttcccgttgaatggtcgtcacgatactcttcatttgtgtatcagacttttcgcccaatacttccagtaacatttggtcaccaattgtttcttgcgtatcaaataacgccttaatttggccatcttcaattaagaattgacgtttcaaagaaatattgacgtcttgcgggccgtcaggcgtttggtacgtaacttcaccagtcttcccttcatagtaaattgatgaaataggtgcccgccagtcataaatcaagaaatgatcttcgcgatcggtgaatgaccctagcccaatataaatggactcagactttggttcacccttttctttaaaatcaatccgcgcgaaataaggggttttttccattttttgtaaagtctcaagttgccgggaagattgttgccaagaattattccgttcttgcaacatttgccgttgttgttcgattgagactgccgtttcagtcattgctgaatcattattgaaattcaaccgtacatcattaaagaagtttgcgttaatttctttttcttctgatttagcccgttcaacggcgccttcgaagtgcttttcggcgtttttaattaaaccgacaatctcggttaaacggcgttgttctaatgatttttgttcgtcagtcaaagcagatgtcccccgatttctaaataaacagttctacaagtttaacactaaattcacaagagtgcgacgataggcgcttatattttgagcattaactggatttaccgaattggcgatgcaatcgtcggttcggtaaatttggttaagcgtagaaatatgcctatcggagcacgtttagagtgcgtttgaaacggtttaactttcgagcattagcctaatcagggaaataagcgatgtagtcgattgttttcctgatgtagctaagcggaaaaagttatttgctaaagcacgtttcacgatcttcccacaaaaaagccggccgctgcaaccaccagccctaacccgtaggttaatagcagataaccaaagaaaatatggtaacggcggcggaaccacagctgactcaattcgctattgaacgttgagaaagtcgtgtagccacccaagaccccgacgcccaaaaagagcgtccacgtttgatccaattgtgccccggtcacccagcctaagcaaaagctccccgttaaattaattaaaaaggtgattaatggatattcgctggcaatctgcgttccaagacgggttaattgataccgcaaaatagcgccgattgccgcgcccaatccgacaattaataacgtcatcattttagcacctgcgactttccttgccgatcgagcagccaaactgcccagtaatctgccactaaacttaagcagacaccgccaatcaaactaatcccgatatacaggctaaatggccaccattgattggccaccaataacttcaatgcatccacgctaaaactagaaaaagtcgtgaaggcgccgaaaaagcccgtgcccattgcaagtgccagcgtatcgctgatctgataacgaaccacgatgtaacgcattaaaaaaggaagacaaaacgccccgattaaattcacacacaaagtgccatacggaaaccctgctgcttggtgcaatccgagcccaattgcatagcgtaaaatcccgccaaaaaaggcaaaaattccaaccgcgagactttcttttatcttcattttagatcgccccctttttaatatcgtagcatctattttacagaagttattaccaattgtaaattagttgtagatattaactagcgataatgccaactttttaataataatttaatcactaacgaattatcaacaaaatcgataatattagcgtcaatatataaaaagccaattttacgaacccgtgctgttgctcggaagctattcggctttgacatgctttagtacccatctagctatcaaagccaacttcctgtgcacagctgtggcccgcaaacagtcggctacaccgcctatttacgaacccgtgctgttgctcggaagctattcggctttgacatgctttagtaggttagtgtatgctctacacaactttattgagcattgaaaggatcttttttatgacaagcttagcgctcgtaatcgttctattggcggctttaatgacgccgttactcatggcaaaatttaagatttcttatttaccaaccgccgttgcggaaattttggtcgggattttactcggacaaagtggcttccacctcatctcaaccacccccacactgacggaactttcatcattgggtgtgaccgtcttaattttcttaagcgggatggaaatcgactttgaactctttaaaaagcaacccaccacagctaaatctggcgttaaaacaccgctgacgcccttacaactggcagtcggtagttttacgctgatcctattaagttcgctaggactcgccagtttattggcatggagtgggttgttcaccgatattggactcgcaacaattctcttttcaaccatcgcgttaggggtcgtcatcgccgcgttgaaagaaaaagaactcctcagccagccgcttggccaaacaattctgttaattgccgtcctcggggaaatcgtcccgctgatttcgttaacaatttatgccgccctcaataatcctggttctaagagtctgtggttactatcactaattttcttagccgcgatcttcttattgatgcgttttaaaactgtttatcacttctttgagcggattgataagtcaacgactcaactcgatattcgtttagcctttttcttaatcatcacacttgtatcgattgccgaagaagtcggtgccgaaagtattttgggcgctttcttagccggcatggtcatgaaacttttacgcccccgtgaagagacgcaagataaattaacatcaatcggctacggctttttcattcccatcttcttcattatgaccggtgcaaaactcaacatccccgcgctcttacgtgatcctaaatcactgaccctgattccctttttcttcatcagtttcatgggcgccaaagttttgatttacttcgtcttaaaacggcgcttcaaagtcaccaacgccctcgccgggactttcctcagttcgacgaccatcacgttggtcttacccattttgacggtcggtctcaacttgaaggttatcacgacacagcaatccggcgctttcacaattgcagcggtgattagctgtattcttggtccgattctgttcaatcgattctacttaccaacgcctgaagagatgccacgcaaacgtgttaacttcatcggcgccaacatcatgacaattccaatcgcccaacagttatccaaaggtctgtacacaagcgaattatttaccaataacgaacaaaattatcaaatctaccatagccaagccaacctcgaactcttgcctgacttggcaccagccaccttaactgacgcggccgtcttcgatacagatatcctggtcttaggctatttaaataatgagcaaaattatcaacttgcccaacaagcgattcaggccaaagtaccgcggatcatcgcccgctttgaatttaagaatatctcggacgatcaatacgatgaacttaaagaacatggcgttgaaatttttaacacttacgaagcaaatatcagtctgttgcgaagtttaatcgagactccatctaccttacaaatcattgataacaccgatgccgggctcttcgaagtcacggttaaaaatcggcgcttcaccgggattcaactttctaatctcccatttgtggaccaagtcacaattagtcgaatttaccgcgataagcaactgatcatgccgcatggtgacacgcaaatccatctcaatgatcacctcattctaacggggaataaacaggctgttcctgccattcgacgccaattagaaacgctcaactaaatcatgttgaccctcgcacattctctctaataggtttataatgaaactatcataattaaaggatggtgcagatatgaaacaaggaacaacaatcctcacattggataatggttaccatttatggactaatacgcaaggaacaggcgacattcatttactctgcttacacggtggccctggtggtaatcacgaatactgggaaaacttcggtaaggaattagctgatcttggtgtacaagtacacatgtacgaccaacttggttcattttattctgatcaacctgattactcacaaccaggcaatgaccaattattaacatatgattacttcttagatgaagttgaagaagtccgtcaaaaactgggcatcgacaacttctacttaatcggccaatcatggggtggcgcattggtccaaatgtacgctgctaaatatggccaacacttaaaaggtgccatcatctcgagtatggtcgatgaaattgacgaatatgtcacaaacatcaacagaattcgtgaagacatcatgacccctgaacaattgaaattcatgcaagactgtgaagctaagaatgattacgacaacgatgaataccaagcacttgttgacaagttaaacgctggttacgttgatcgcaaacaaccacttgcaatctcacatttaatcccaacaatggcaaccgacgtttatggcgtcttccaaggtgataatgaattcgttgtgactgggaaattaaaggattggcatttccgtgaccaactccacaagattactgtcccaacgttaatcacatttggtgaacacgaaaccatgccaatcgcaaccgctaagatcatggctgaaaagattccccatgctcgcttagtgacaacgccaaatggtggtcaccatcacatgattgataacgcacccgtttacttcgatcacttgaagactttcatcaaagacgtagaaaatggcaactttaacgattaaataaaaaaagccgcgcacaaatttaaatttgtgcgcggctttttttgacctaatcaataatatctgaattaggttcccatttatccagtgtatcgaataagtggtttgtttgtgcgaataattgagaaaggtctgcattgccgtcatctttaaaatgtttaaagaataagtagaaatcgacttccaattgatcaaccattcgtaatccttgctcattcaatgaaatgaatactttacgttggtccatttcatcactgcgatttttaacaattaagtgttttctgaataaaacattaattttacgtgaaattgctgggcctgaaagatcaaaggattccgataatttcgccacttcaatattggggtttaatttgacctctctgagaatcaaaaattgatcgtatgtcaagtcgtgcgtgacagttaaatgatttatcttattgtaaatttggccaatttgcagataccattcgttgaatcgatcaacaaggttactatccgtttctggttgcatcgaaccactcctttacataaacactaaatgtggttattaagtgttactagtcaaaaataacacaaaatgtataaaattaaaagatttatgcttaaaatattaataaatattgataaagttatttattagtatcttttaaaatttattctttcttaatgataattgcaattgattataaatcaattgttattattaccattaaaaattataaatgtatataaccgttttgcaaaaaatatggaatgaccctgcacaccatttttatctatgctagaatgaaggtactaaaagctattgttggagggttacgatatgaaacgaatcacactttatttagtgcgtcacggtcaaacattctttaaccgttataaccggatgcaaggttggtcagactcaccacttactccgaaagggattgcagatgccgaacgcgctggcaaagaattagcgaaagttaattttgctcaagcttattctagtgaccgcagtcgcgcaatggacaccgctaaaattattctccataagaatttctaccttgatactccatatgctatcacaccgcacttccgcgaagaattctacggctattttgaaggtgaagattcacccaaagcgtggtacatggcaggtgccagtcatgatgccaaaaccttccaagaaatcatcaccaaatactcactcgatgcctctaaagatttcatgaaagaagctgatcccttccacgatgctgaagatgccgctgaatattgggcccgcgtcggtaaaggtttcaaacaacttcgtgctgaatgttctgacggtgataaagtcttgatggtcagtcatggcacaaccattcgcagtattgttggcaagtttggtaacgaccaattcgatgttaccgttagtccaatgaacggtagtattactaaagttattttaacagacgaaggcgttactgttgaaagttacaatcaattaacccttcaatagtatcaaaacgataattgatgtatgaatattcattgaatatagagctgggcaatattattctgactgttcagctttttttgtgggcaataattcatgccgttcaataataatacgcgcttcaaatgacagtttcggcagtcttctttggctttttttgtaggtaaaatgctcaccacaattgtagctaagcaagttaaaaactaatccagcgtggtatacgcctcttaatgacatcagtgtaacaagtagcgtctagagaaacaacttcgacctcatctaaaaagagccccctttaatctcgaagttcagattaaagggggcttttttagactgattcctatgttttaaactgtttcaaccatctactatttaacttccttcaacacaattcctttgtagagccatgtagtgagcaagtagtagattgcgtagagaataatgaaaattgaaaatggaatccagagatcattatatggatcaatcataatcaatttgaacaattgaagaccaaagaggacatggatgacgccgacgatacctggtaagaggaataagaccccaatttctttggcaatggattgttgcaatagattgcgacgcgtcccgattttagccaacattgtgtagcgtttaacatcactagctgccccagataaaatcttgaacatcaagcaacttgctaacatcgctaagaatgcaatcccgaggaagaagcccataaattcgagccccctgaacatgctgttcgctagcttatagttagcatacttgctactatccattgtagccccttgacctttagccaattcaggatttgcaatcacttgttgtgcgtgaatttttttgataacgggtaaattaaccgcaaagtctttgacccgatatgttttaacttgcgtggttgcgcctgccacttgattaaattcagcgtcagagacgactttaacgtccttactagattgacttggcacttgaattgcgcgtaaggatgaagaatcgccgttttgaatctcactgagtttcaccggtttaaccccttttgcgcgggcgacaccattcccattaccaaactgaatggccatgattggtgacttttcaagttgtgctgtccgatagtagacagttttcgcatcttctttaacatcgtaattagcagtcgccttcacaccctttaaatcttttgtgaggcgcaatgcttcttggttcggttgatttaaaacaacgtcgtaaggcgccattgtttctgccatttctggaatttcactttgatagccaatcccaactgtgattgcgcctagtgccaatgcaaataacatcgccaccaatgcgagcatcttggtgtaatccttaatacggaagctcaattgcgctaacgtaaaattatttaaaccacgattacgaatcttgctgttacgtttgagcaacgtaatcaaccagccaaaaaaggcattaaacaagaagtacgtcccgagcacaattgtcactaatgccacaactaagcccataatttggaacgttgcgactttaatcatcatatagtaaccaacagctaagaaaagtaagcccaagacaatttgtacaatacggcttaatttattttgtgaaacgcgatttggttgttgatcatcgtgtaagagttgtaaaactggtgttttcaaaagttggaattgattaactaccgctgcaataatgaacaagataatgaagaaaatcaaagttactaacactgcaggtaagtaaaacggtgagaaatgcttaatctgaatatccatttgagacaataacagactgctaacaatttgggttaatccgaccccgagcgccgttccactgagagtagcagctgtcccaatcactaatgtttcagcagcaattagttgggcaattttgcggccttttgcgccgagcatcataaacatcccgtaatctcgacgccgcatgctcattaagaaattattcgcataaataatgtagactaatgtgataatccctaataaaacagacccgatttggaaaataatgcccgccatgctaattggcgagttactcgtaacgaaacttttgttagttgccagtgcttcgaacatgtaaaaaatggcacttgccataattagaccggaaaaaagcactaaatagtctttcaaacggcctttaatgccggttaatgataacttcaataacatatttagacttcctcctaatggttaaatgtgcctaatgtatctaaaatttcttgataaaaggcttcccgactcttatcgccgtgaacgagttcttggccgatttgaccatctttaataaacaagattcgttgacaataactagctgaaaatggatcatgcgttaccaataagattgaaacgcgttgttcttcgttcagctgagccattgtatccaataattccttggcactctttgaatcaagcgcacccgttggttcgtctccgaataaaatagctggattatggactaaagcccgcgcagcggcgacccgttgtttttgaccacctgataattcggttggatatttgtttaataaactatcgattgataacgtcttggcaattgatgtgactaaatcgcggacttttttaccgccaacattttgtaacgtcaatggtaatgccatattttcataggccgttaagttttctaataagttgaagtcttggaacatgaacccaatttccttggcacgaaaatcagctaattcattccctttcaacccattaattgcttgcccgttaatttcaacttggccagcagtcggtttgtcaagggttgataaaatgttcaataaggtggttttccctgaaccagaagcccccatgatcccgacaaattcgccctgtttcacatcaaaagtaacgccttttaaggctgtgtattgtttttcgtttggtttaccgtatgtttttttaacgtctttgacgctaacgactgttggtgtgtccattaataatgcctccagattttatgataattctatcttacaagagattaaaacggcatgcgcgctttttagatgacattttaacgggctaaaataacaattttgtaagattattcccccgttctttaaaaatcaatgtgaaacagtcaaaaaagttttgtcttccctttctgatttgattataataaaaacattgtgaattttcagaaaaggggtttctttacgatggatgaaatagaaccaaaaaagaaatatattacctggcaagtccttgctttaatggattttgtgaccgtcattggatttgacgatattatttataactttcaaaaccaagggatggcagttgtcttctcatggattgtcttactattcgcctatgtcctcccttatgaattaatggttggtcacttaggctctgctttcagtaaagacggtggcggtctttccagttggatgcgccatacaagcggtgatgtttggggttacttaaccgcttggtgttactgggtagcgagtttgccatacttggtcgatgttgctaattcaatggtcgtttccttcttttggattattactgggaacggaaatcttgaagacaagctctcacgggcttcctttgcgcttttaacagccgcaattaccatcctcttcatcttcttccaacacaagtttacatcgtctctacaggtactcagtatcgttggtgggggggcgatgtttgtcatgaccatcctctttgtcctaatgacctttgttggtttattgaacggtggtcacgttgccacccatccattaaacgcacacaccttcattccaaaatttgatttacattacttctcaaccatcggcctcttaattttcgccatgaacggtgccgaacttgttgcaccatacgttggccaaatgaaagatggtaaaaaagattttccaaaagccatgatggccctcgctctaatgaccgccttcctaaccatcttcggctcattagcaatcggcgtcttcttcgatgccaaccacttaccagctgacttgaagatgaacggttcatactacgccttcttagcccttgggcaacaattccacatgggtaaagtcttactctacatcttcgctgttacccaagcgatttacatgggcgctcaattagcgatgctactcgatggcggcacacggattttcttatccgacactgccaaacaattcttaccaaaagcactgactaagaccaataaacaaggccttccaatcaacggttactggttgaccactgggatttgtacctttgttttagcatctagtgcctttctgcccgagattaacgacatcttcaattggttgttaaatattaacggtatcgtctcaccatttgtaacttgtttcatctttgtcgccttcttacgggtccgtttcaatagtgaaaaattcccatcagaatacacatacattaaaaacaaaccatgggccatcatcgttggcttctggtgtttagccattacagcattaggaacgatcttcagtatcttcccacaagatgccacacctggcacagccaaatatacacacgaattaatcttaaacatcgtcgtctcagtcgccttaatgggcctcggcgtgattttaccactggttgcaaaattccaaagaaaacgagcagcctaactaaaaaagattcgccccatatgggcgaatctttttttattgcctgggaaatgttaataaatcataaagccatctggttcaatgatggtcgctgctgtttgctgctgaaccccttcagacagaattggtgtcctcattgatgcaacactaacggctgtttgacctgcattaaaaacagccgtcaattgttgctcacctaatcgccgagtcatttttaagacgtcgggatgagtcggctcaattaaccactcaagctgtccttccgacaatagtttttgcttaccatggcgaagcccaattagctgcttaacgaactgatacatggcttgatcttggtccacgggatcccacaccatgcatttacgattagcaggatcgtccactcccgtcatgccatactcatctccataatagaggcatggcacacccggctgtagatacataaaagccatcgtttgacgcatcaagcgtcgattgtcgttggccatcgttagcaaccgcggcgtatcgtgcgaatctaggatattaaactgcacctgattaatttgatcccggtacagcattaactgtcgattcagcttcgaaaccatttggtggagcggaatttttttatgaataaaataatccaaaatcgcatcagtgtaggcgtaattcatgactgcactaaactcgtcaccgctgagccaactctgcgctgaatgccaaatttcaccaagaatatagaaatcaggtttagcagcatcacacacctgtcggaactttttccaaaagtgatgatcaacttcattggcgacatctaaccgccaagcatcaatatcaaatgcttcaatccaataccgcgctatcgataacaaataagcttgcacctctggattagccgtatttaattttggcatgtgtggcgtcgtggcaaagacatcatatgtaatgtctgtagcatcttcgaaattccgacctggctgataacgcactggaaaatcccgaatatggaaccaatcagcataccttgaagccgcgccattttgaatcacatcttgccattgtggtgattgatcgccgagatggttgaagacagcatctagcatgaccttaatccctctttgatgacaagcagtaatcagctgccgtagcgtctcgtcattgccaaaatgtggatcaaccatccgataatcacgcgtatcatatttatgatttgaaggcgccatgaaaattggattgagatacaatccattaatccctaacgccaccaaatgatctaaatggtcaataaccccttgtaaatcaccgccatagaaatcttgagcctgtggtgcctcatttgtccacggtaatgttccatctggatcatttgtcggatcaccatttgcaaatcgttcaggaaaaacctgataccaaaccgtttgtttgacccactctggtaccttagcccgatcaatttcttggaaatagggcatccgaaaacaagcatctgttttaggtaagattggaccaggcccctgatcaccataaaaagtgctggtcccgtccacaccaatcacttgaaaagcataggctaatcggcggcgatcaatggtcagttcaatcgtccaaaaacaagcgagatccgttattaagccttgctgcatccgaatcgttttcggttgccaactgccatcgactaatatataaggatccccatacactaggtacactgcttcaacgtcattacttgccgtccgcaatcgtacccgtagcctatctggctgatataagaaagcaaactcactatctggtcgatgataaatcgctgctaaatccatttgtctcctccttaaaaaaaccagtccaacacacacccgaaggctcggttgcactgattaattagtgttgatactgttcaaaggcttgttctaacaaatcagccgttaacgccgccgttgtagggacaacaaccgccgctgctgataattcgctcgcatgaccaatcgcaaccgaaacagcgcctgcagcattaatggcggccacaccagctactgaatcttctaatccaacgcattttcgcggattaacagcaatcttctgagcagctgcgatgaagatatccggggctggtttaccttggtgcacgtcattcggattaacaatcgctgtaaaatatgctgataaagctaatcgatcaagaatgagtggcgcatttttgctagcagaagcaatgaccattggcaccccgcgcgcttttaatgctactaacaacggttgaatacccggtaaaatatcggcagccgttaattgcttgatagcagccacgtaattttcatttttttgagtcgccagtgctgcgagttgtgccaccgtatactggccatcaagttgggcaaaggccacaattcgttgcaaggatgcttcccgactaatcccttttaactcagcttcaaagctatctggtaagctgacgccaaacgcttgttgcgccaattgacgccacgccgcaaaatgaaatcgggctgtatccgtaataaccccatctaaatcgaataagacaccgtccataataacctcctattccaacatcatcgacgcatcattgacttgaattgccaaacgatcgcccttgagtagtttgatatcagttcggtcggccgtcacgctaattttcaacaaccggccgcggaagttaatatggaattcataagccgtccattttttgggtagaaatggtttgaatgataattgtccttcatcgctaattcgcatgcctgcaaaaccttgcacaatcgctaaccaactccccgtcatcgacgtaatgtgcaatccgtcatcggtatcattattgtaattatcgagatccaggcgtgccgtccgcgcgtacatttccaccgctttatcttcgtaatgcagatcagccgctagaatcgcatggaccgccgctgataaacttgattcatgaaccgtcaacggttcatagaaatcaaaattacgcttcttttcagcagctgaaaaacgatccataaaataccaaatgccttgtagaacatcggcttgtttaatgtacggcgaacgcaaaatcttatcccatgaccaatgttggttgatgggccgttgatctgctgggattgcactgacaggctggatatctttatctaaaaagccatcttgttgaagaaagatcccgagttgttcatcttgtggcaggtacattttttcaataatcgcttgccattgtgagagttctgcatctgaaagtctcagatccgcttttttgttatcgcttacttttttgagcgtttcaatcgtataactaagcgtccattgcgccaataaattcgtataccagttattgttaatattgttttcatattcattaggccctgtcacaccgtggatcatataccgctgcgcacgttgtgagaaatggacacggtctgcccaaaagcgtgcaatctcagttaacacttcgataccttcattgagcaaataagtctcatcgccggtgtaacgtgtgtagttataaattgcataggcgattgtgccattgcgatggatttcttcaaatgtaatttcccattcattatggttctcaatcccatcaaaggtcaccattggatagagcgcgccttttaacccctgttgccgggcattgtgttctgcacccgacaattgattatgccgatacttcaatagattcaacgacactttcggatcagccaatgagagataaagcggcattgcaaaaccttccgtgtcccagtaagttgcaccaccgtatttttcgccagtgaatcctttaggaccgatatttagacgctcatcttcaccataaaaggttgaaaaaagttgaaataaattaaagcgaatcccctgttgggcactatcatcaccggcaatcaccacgtccgccatctgccaccgtttcgcccattgattcgtctgtgccgctaataattgctggtaactttgttgcgcaacgacctgcttgatacgttgcatatttggtaccaagtccaactctgaataatctcgagaagtcaccactaccgctcgtttttcaaaattcaattgcgttttaggggccaattgctgtttaaaacgttgcccaacttggtgggcttcttgaagcccagtatctgccatcattgtcgtttgatgatcaatttgaacccccacactaaaccgtggtaccccgaaatcgttgggcattgtttttccgaccaaataagtgtcatccgcagcgtctgactgctcaatcacttgccagaattgctcaccgtaattcgcatcctcattttgaacatcagcatcgatcatagaactaatctcaatctcaactgcttcgctcgccaagttttcaacagtgtagcgcaatgcgcataattccttttgaacgatactaacaaaccgctctatcgtaacttgcacttgtttattatttttagtaacgatgaattggcgggttaacaccccattatgcatgtcgagtgccaacttaaatgcggtcacttcatctttgcctaaatccaccgcttgaccatcaattttaagattcgttttgatgaaattgatggcattgatcactttcccaaaatagtcaggataaccatttttccaccagccaacgacggttttatccggataccagacgccaccgagataaatgccaggcaggctgtctcctgaataatcctcttcgaatacgccgcgcatccccatgtaaccattaccgatactcgtcatactctcttgtagccgtttatgtttacgatctagttgatgcgtgacaatctgccacggatcgacttcaaaaattctctccatttcgttccctccgatacgtcagccaaaatcattccgcctatttagcagcgcttaatagattgtttcttccgttgcaatgtcgaagtagtgtgctttagacatttcaagcaccatctcaacccgatcaccaggttcatgataatcccgcgaattaacttcagcgataaaatcggtttgtccaatctttgagtagagcattgtgttagcccctaataactcggaaacgacaacctctgccgttattttagcatctgggaatgtttggagggtaatttcttcagcgtgaatatcttccggccgaatccccaagatcacttgttgaccatcgtagccaccggcaataagctgtttcaactgaccttctggcactgcgatatttagaccatcgtcattcactagatgcccattagttaaggttaccgtgaagaaattcgttgctggtgaaccgataaagcctgccacaaacttattaaccggatgattatagagttcagttggcttgccgacttgctggattttaccatcgttcatgatgacaatccgatcagccatcgtcatcgcttcaacttgatcatgcgtcacatagatgaaattacgacctaagcgttgatgtaattgcgcaatttcagtccgcatttgcacccgtaacttggcatccaagttcgataatggttcatccaataagaacaacttagcatcacgaacaattgctcgtcctaaagctactcgttgccgttgcccaccagaaagagaagatggcttccgatctaaatactccgataaacctaagatttctgctgcggcatcaacccgttttttggtatcttgcttatcattcttacgaatattaaggccaaacgccatgttatcgaagactgtcatatggggatagagcgcatagttttggaaaaccatcgagatatctcgatccttaggtgcaaccttgttcatcactcggtcgcccattttaaattccccatcagagatatcttctaaacctgcaatcattcgtaaagttgtcgatttaccacagcctgatggcccaacaaatacgatgaattcaccgtctgcaattttcaaattgaaatctgtgacagaattggtatcatttcctgaatattttttattgatatgatttaaattaatttcgaccatcgatcatttctcccttacttcgtttttaactggtgcaccgttcaataattgatagctaatgaaggctgccaacgaaacgctcgcaacaagaatcataaacgcgagttttaaaaagacattaatgcccatcaacaagatgaaaacgccggtggctagcactaatttgcccccattggcaatgataaagccgcctaaggtaacatcatggcgcgctaacccgaccaagtagcttctggcaacgacaactagcaataacgccccaaaccagaccaataagccgctacgaactaaaatatcgcctacactggcttttagtaacaacacgatgatcatcaatgccgtcgctaacgtcagattcactaaaaagtctggcagtgcctgccgccacccttttaacacaacgcgtgcataattaccatcaccgttaacttgccattggtccaccgctctaaaaaccgcgactaaacttggtagtgtaaacaaactgagcattaacactagcacaactgcaccgggaatcattactcggccgtttggcatactaaacgttaaaatcagtgtcagaatgacaggaaaattaattccaaaccaagcaaggttgatggtaaaaagcgaccataaccaattcccggctgccaataacgtttgtcttgtttcgctgtgctttttcacgatcaacacttccttaattatttaacggcgccatctgtaacacctttgataatccatttttgagcgaataagtagaagacaatgaccggaataatcgacaaggtaatgccggctaatgcgaggtgccattgtttcgtgtattctccgaagaaattaaacatttgtagtggaatcgtatattgcacttgtggtaagaccaatgatggtaaaagataatcgttccagatcgcaatgatgttcaaaatagcgaccgtcacagtcattggactcaacattggtaagatgatcttgtaataaatttgccaccgactggcaccttccatttcagccgcctcatccattgcaatcggaatacttgaaagggtgccttgatataggaaaatcgataaactacagttgaagcctaaatacatgaacatcaagccgtacatattcaacagatgcacattaccgaagtttgccgtcaacggaatcataactgattggaatggaatcaacatcgctgagatgaaaagcagcaataaactgctactcaacttcgatttattccgttgcagtgcataggctgccattgaagaacagaggataatcagcaacacactgcagactgtaataatgagcgaattggtcaatgaactaatgaaattcaatgctttaaacgaatctccatagttcacattcgtgaatggattaggcagcgacaatactgaggcaaaaatgccttttggtgttttaaatgagttcgttagaatcatatagaatgggaataaccataaaagaccaatcaatacaccgaggacgccgatccaactatttcttttcttattcattagaaatcgccctcccgtttacggttataaaagacttgtactaaagaaatcgcagcgacaatcaagaagaagaccattgctttagcttcagcgagtgcgaaatcactcgaattataggctgtattcacaatatccatcgccaacatttgggtcgagttgtaaggtcccccgttggtcaacgacaagttttgatcgtagattttaaacccattcgacagggttaaaaacatacagacggtaaatgctggcgcgatcattgggaatgtaatccgcgtaaatcgttgccaagcagatgcaccatcaatttcagcagcttcaatcacttcacttggaatattttgcaagtaagcaatatagataatcatgatgtaaccactcatttgccaaaccgtcacaattaccaagccccaaaaaccggttagtgaattcgttaaccagttttggaagacagtcatgtgtaaggcagatcccaaagcactaaagccttgcgtgaaaatgaattgccagataaatcctaagattaacccaccaatcatgtttggcataaagaagatcgctcgtaaaaaattgttgcctttaaatttctgtgtcacaagtaatgctaaccccaagccaattacatttagcaagatgacggtcacgataacaaaagctaccgtgaaccaaaaggcgtttccgaatgctttatcttgtaataaggccatgtagtttttaaacccaacgaccttagtaaaagagagtccatcccagtcagtgaatgaatagaataggccctccagcattggaatgaaaacgactaatgctaatgcaacaagggtaggggttaaaaataaccaaaatgataaactcttatttttcatttcaataccctctttttgttttatccaattgaataaatttatttagtttgttgttttgtccaaccgtccttcatatttgaaacagtcttttgccaatcttggtcacctgatagatatttttgtaggttaggttgggcaacgtctggatcccatgatgtgccagtataacccgggaaaacccagccgaatgttgctttcttttgactgtaatcatagaccgattgtgtgagtgcatctggcatcttcacatcaccgtaacctttataagcaggtacgaaatgtaatttctcaacaacgtcttttttaccttctttagacgtatatagccagttcaagaagtccttagctgctttttgttcgtcggtactcttccgtttattaactgcccagtagattgaggtcccaacaggcatcttaccttgttgttccttaactggcattggaatcatgccgatcccgtcttgagcgaatttcgcatcaatttggttaacggtttcgtaaatccagtcgccttgttgaatcatcgcaacttttccttgagcaaagttttggttcacttgtcccgcgtaatccatttgcatgactggttgaacggaatattctttttgcaaatcaatcatttgtttcatttctgcattgttttcaaacttcattttctttgaggtatacaatttttgtgcattgccatcaaattctttacttagataaacattcaacaaatgatctgaaagaatccatgattccttaccaggtaaagcaaagacccctttaatgcctaattgttctttttgttcatttaatgttttaacagctgcttctaatttatcgtaagtcgttaagctctttggatcgataccggctttttcgaagacagctttattataaacaaaaccatagccttcaatgttaaatggcaagccgtaaactttcccttgtgacttaacagtatctagtgtgcttggaatagcggccttagcagcttttgtatccgttaaatcagccgtgtagttcttgaattgtttaaccgatgctggcccatctaaactaaaaatagtaggtgcattcccggatgaaattctcgtcttcaaaacgggattatactgtgtcccaccaccgattgatgtgatttcaatcttgacgtttggatgtgctttttcatacttcttcgcaatcgctttgaattgcttgttggattccacttttccttgtagaattgtgattttcacattgccgccatccgcactcttgctcccacaagcagccaatgttaacgttacaccagccaataacgaaactaaccctagctttttccacatctttttcactataacgacctccaataaatttttatcagtgctgtttacaagttttattgtcgtactttgaaagcgcttttgcaaatgttttcctgatgttaccggtaacagttttcttatgcttattccgattgttcttttagcacagggcgaattgtcccgcccatttcaatgtgtggttcgaatatcaatggtcgctcaatccactcctgattaattttcttgaggatattctctccgcatgcacggcccatttcaatgatggactgcttaatcgttgtcaacttaggagaggcaacttgatttaaaaagaccccatcaaatcctgtaatcccaaactcttgcggcacatgaccaccacacgacgcaatcccccgttcaatcccaattgccagacgatccgtggcacaaataaacgcagtctcgagtttgaattgcgcccagtgttcaatgatgtaggcttcggtcaaatgactatggttgttaaaatggtgtaactgaacaggacgctgctgctcatgcattaattgtaaataaccggcttcacgtgatttttcaaacgcttcttcactcgccattccaatataaataagctggcgataaccacgctctaatgctaattgcgctgcaaggtaggtccccaactggttatttgtatccacataatcaaaaccgtactgattctccccaaaaacgacgactggctttgtcagatcgcgaatccatgcaacatccctttcacgcaatcccgtaataatgtagccatcacaattcccgatatcaaagttacgccgagttactaactgcagcgaatactgatgtaggtcaagtgccttagcaattccgaccattagattcatgtaatatggttcggtaacgtcgatgtcttccaagatacacaatttgatgattcgggtactgttgctgactagggctttggcaattaaattgggacggtaatccaattccttcattgcggcatacaccaattccttcaattcatctgttacttgttccggatgattaatcacccgcgaaactgtcatcttagaaacgtttgcccgcttagcgacgtccattaatgttgccatttctccaccccttaagttcaactttttatattctttcacaattataccaatttatgcataaaatgattacgatttaccttattggtattaaaaaagcccatcatctaaagatgatgggctttcccttttttattctataattgtttgatttatctgccgtaagtgctccaagtccgttgctttgatgccagtatgcttagtaatatctttttttagcgctttgtacttgcggaggccttcttcagttgcttctaaccaaacattccgttggtcattttccatatcacgaattttgcgaataaactttttactttgtagcgtattgattttacgggaagccgctggtgcggaggtcccaaatacgactgcaatttggcctggggtgttccgtcctagttccacaatctgttccaacacgagaaattgatcataacttaagccatgtttttcgctcattttattcaattgagtcgtgatgttctgacactccagataccactcactaattgttaatattcttttattatctggcatctgcaaccctccaccgttcattcaatatagttttaacttatgtacaataaatgaccaccggctagtcaaaagccgacaatcatttatttaaaacaaactagcggctcatttcaacttgattaagcagcagttaaggttagtttatatcattgtttggttatgtgcaagtatatttcacgcgacgataattgccaatcgttcattaaaaaccttttaaaaccaatgtttgagcgatgtttttcggattattttaatttgtagataaatttacgaattttctgaaaacgccaataagaacctttgatgcgaaggggtcacaactcatgagttatgacctagtttatttttataaaaatcaacaattaatgccgataattcatttgcgcaactattttatttttcgtctatccgttgctacaattggtttttggccacaaaaaaaacgaagttcagttaattcacgaacttcgttttttgtgttaaacgactggatatttattttttaaatagtaataaaagggcaatccgagtaatgtaattccgattccgattaaagttaacatcgtctgtgtgaataatgtattcaccacgatgaaaatcccaccaagaatggcgatgagtggaatcactggataaccaagtgtgcgatacggacggtttaattctggttcacgtttgcgcagaatgaacacagcgataaacgttagaatatagaaaatccagatgacaacaaccaacatatcagtcaatgtattgaagccacccataaacatcataacgatggcgatactaatttgaactaaaccactgacaaccggcgcgcctgttttagaaagggagcgcagttgtcgactgaatggtaaccgattctcgagcgccatcgcataaggaatccgcatcccagtcatcgtgtagccgttaatcccgccatagacggaaattaaaatccccatagtgatgattttaccacccacaccaccaaatagcactcgagccacttctgaagccgcattcggattgccggcaatctgattgattggcaacacaagaacgaagacggcgctcactaagaggtagacaaccatggttcctgttaaaccaattaaaattgaccgcggcaaatcgcgttccggatgcttcaattcacccgcaatattcccaacgtgaatccagccatcatacgcaaagagggttgctagaacaccactgcccagcgctgacaggaaactccccgatccatttgaccgggtcacgtcaaataatgacacatgaacggcgttgctgcctggatgaattaacccgaacacaataataatcgcaagcgggattaatttaaagacggttgtgaaggattggaatagtcccccaacccgggaaccaaagaaattcaagattgttaagctgagtccgacgatgattgcaattggaatctgccagtgagctgaccaactgaataagttaatgcattgcgttgcaaaaacaatcgacaacgccgcaatgttcgctggaaagtagactgttgtttcggcccaacctaataaaaatgccgctaaactaccataagtatggtcgatgtaccgcatcatcccgccagtttctggaatcgcagctgctaattcagcagctgtcaatccagcacaaattgtgattaagccgccgacaagccatgcaagcattgtcagcccggtggagccggtcgcatgcgtcacaggatccgctttaaagaacacaccagcgccgatgaccgttcccatcacagtggctaatgccgcggtaaatccaatcgtttgatttaatgcttgtttttccgtgggcatcttaaccgcctcctaatatcatttataatatttattatgacatgttgaaagcggtctttactagtctaatttgcaactaaattcggatatgtgcggcggaaatcttccattgcaccaatcaagttcgcatcattatgatactgacacgtccgaatggttggcatgaaaggcgcaatatcgacttgcttgagtatttcctgtaaagctttttcaatatttggcaccaagaaatcggcctgcgacaccccaccacctaaaataaccgcttctgaatcaaaactatattgtaaattatagatggcttgtgcgagattatcatagagcacctgtgcctccttttgcgcgagtaaatcgccttgatcagccaattcaaaaacttcacgccctgagtagttagtatgtgcctcttgattataacggtcagccatgtgaacggcggtcccgacttcacttaaaatccgaccatcattcatcatcatgtagccaaactcaccaccgaataaatggcgaccatgttggacttgtccgttgacaatcactgaaccaccaacgccagtgccaattaccatgaacaacacattttttagccctttagcagccccactaccgacttcggctaaagccgcgcaattcgcatcattttccattacgactggtaagtcaaagcgcgtttcaagttcatcttgaatttcaaaatgatgaatataagggagcgcactggccccttcaataatacccgtcgccttgttcactgcacccggcgtactcattgcgaccccaacaacttggtcactagccttaaactccgccacaatctgcgtcagcacatcataatacgcattcaacgactttggtgtggcaacagccccttgtttggtcaattgttgcgccgcaccatcccataaaccatatttaatcgtagtgccaccaacatcaagtaatgctaaatttttcattcgtcaatcccccaatcgattctcttatgtattttgataaccgcttacattctaccataaaattacgctgggcacccacaacagtgttaattattggcgtacacgctaaaggcgaactttggtttttaatggctttcatggtacacttaacggataaggtgggtaatcacccatttcacatcaaaggagcgtcaacaacatgtcaactaacgtttgtttaatcgcaatcacaattgaataatcatgtggccattttgcggctatttctgttggcattcgctttttaaatttaattaactgagggctgtgacaaaagaatatttttgccatggccctttttttcaattgaaacgtgctccaccaggcatctgctctcggttagctacgtcagccaaataaccaacaaatcggtttttcgtctgcctatgctaatcctcagcagataaccgccggtgccgcactcttatcttaaacgtgctttcttcaaatagccgtctgcgtttagcgccatctcgtaaacaatcggcgttgccgctcatttacgagatattgctaatcctcaacggctgaccatttgaagacgcactctcacaaaaaggagatctcatggaagaaacttatatgcaacctaaaaaggttttaatcactggtgttagtcaacgccaagttaattttgactatacaatgcgcgaactgggcgaactagcccgtgccgataacttagaagtcgttggtgacgttcgccaaaatatcgaccaagctaatcacgccacttattttggtaaagggaaggttcaagaaattaaagaacgcgccgtcgctgaagatgcggacattatcttgattaacgatgaactttcaccttcacagattcggaatttagaaaaagaactcggaataagcattcttgatcggacgcaattaattcttgaaatctttgctagccgtgccaaaacaaaagaagcgcaactccaagtggccatcgccgaagcgaaataccaattaccacgcctccatccttctgaaaacaagttggatcaacaaggtggcgggggtactgcgaaccgtggggcgggtgaaacccaacttgaattggatcgccgactcatcgaaaaacggattacgaagctcaaagccgaacttgctaaaatcgatcaacaacaactcgtacaacgccgtcaacggacgaaaaatgcgattccagttgtcgcactcgtcgggtacaccaatgcaggtaaatcaacgactatgaatcgaattttacaacggttgaaccccgatacacctgaaaaacaagtttttgaaaaggatatgctctttgccaccttagacacgagtgtccgcgaaatcgtcctccccaaccaacagaaattcctgttgagtgatacggttggtttcgtcacaaaacttcctcatcacttaattcaagcctttaaatcaaccttagctgaagcagcgagtgctgatcttttaatccacgtggttgattactcagatccaaactacttggacatgatggaaacgacacaagaaacccttgaatcactcaacattaaagatatcccagtcatcgaggcttacaataaagctgatttgaaaccagatacgcgctatcctgaagtagacggaaaccaaatcgtttattcagctcgcgacgaagtagcaatcgatgcattgattgccttaattaacaaacaactctttgaacaatacccaacgctcgacttcttagtcccatacacagaagggcaagctgtttcgtacctcagtgatcgtgccaatatcactaaacaaagctatgaagaagatggcacgttgattcgtgcacaaatcaacccagacctattaggacccgttaaaaagttcgttcaagcatagccaagcgctactttgcggcaaacaaaaaagcccatcgacataaatgtcgatgggcttttttcaatttcttattgatactttctgaaaaacttatctgaagctgcttttaagctttgaatttcttttgaatcaatattcattgttagctgtgtagactcttgagcataagccgctgcaatctcttgcaaaccaactaatgctttccgactgagcgtcacatagctttgtggaatctcattatcctgaacgaataataataaacctgcagcttttaaacggtcgatatcattttctgaaaccccgattgaatgaagggtttccaaatctgcgcgttaatcatcggctagttgcttaattcgttgtaatagcgcggcttcatcaagattaaactcaactttttcgcaaatcatatctagcgtttcaaaatattgcatgctagcaacactagcgtgcaatgtattgataatttcatcgactgttttttctggttttaaataataaatcgtcattttattgtacccactatttttattaggattaaaacacttacttgatagttggtgatttgactgatgtagctaaccggaagaagatggcttatggcgcacgttttagcgggtcgttattatccagagatggaaagtagcgacccgttttttgcgttcagacgtgcatttaagcggaaggtcggctagaatgaaattatcaaaacatgtttagagggttaacgcatgaatgtcaaaaaacaatctataatgatgcgcttagcgcaacattttaaccgattccaatccgcggcggtctatcagattatgcagcgaagtttaacgttgttatttccatttgtcttgattgggagtatcagccaactcatccagctagcactttttaaccggaatagttttgttgtgaatgtatttcatctttcgaattggttgagtaaacggaatatctttcagatgatgtttgacagcattacgagtttgacgttaggaatcgttgcggcattagcagcgatgtgtgcggcgcgctatacagccaaacactataagcgtgatgaacaattagccagcattacggggcttattgcctatttaatcttagcgttacggttgacgccaaatgagggcttatctttcaatagccagatgttgggaatggggggcttattttttggcctattagtcggctatctgactggattagccttcaaaaaattagggcgacctcatcggcgtgatttaccgctgaatgggtcagcagtaggacgttcattggattctatgtgggcgattttattggtgctcggcgtcattttagggctgagtgtcctgctaaattggttggcgatttcaatcttgccagatcaagtcatcttacgattacaatcactaaaagcaaatcaaacgggtctgcttttcacgttggggactggtttagcggccactagcttaactttttttggattaacgagtatgccaacattggcccaatttgggcgtgagggaatcgcatcttcggccaacttaaactatgcgtttagtcatcacacggcttggcacgttccatatccgttcacgttagggactttgtatgaaccctttggtgcgattggcgggacgggtgggacattagccttagtgattgccgttttcatcttcagcaaacaaagggattatcatttgattggtcgatggtcgctgttgcccgttttatttaactttaatagtgcggtccttgtgggaatgcctgtcattggaaatggcttgtatgtgattccattcttattggtaccactggtaaatatggggattgcatcggcagcagttgcattgaatctcatgccatcggtagtcttcacggttccacttgggacccccggcttattgcaagcgttcatgggcaccaacggtaatttagtcgcgctggcggtgacggtattaaacgttgtcgtcggcgtgatgatctacaagccgtttgtccaattggcagatcaattagcactcgtaaaggaggcggcataaattggccaaattaagaaaaaaaagcctctggttgttagtcattagtttggccttgatcggcggattaatgtggccagctgctcaatggagtcgccagagcgtgatgaccttagctaagcgccatgattcacgaatgtcaccggtaatttttattccagggagtagtgcaacccaaaatcggtttgatgaattagtggctaaattgaacgctaaccgcgggaatcggcacagcttgttaaaactaactgtgcatgaaaataatcagattagctattcaggggaaattaaaccgcgggataatgaaccgtttatcgtggttggttttgaaaataataaggacggttacagtaatattcaaaagcaagctaaatggttttcgctcgcgtttaccgcgttgactaagaagtatcaatttaataactttaaagcggttggccattccaatggtggcttaatttatacagcttttttagaagattattttaatcgcgatgatattacagtgaagaagttgatgacgattggttcgccgtataacttttccgaaacgtcgattacgcataagtcacagatgctgacggatttcattaagaaacgtaaaaatattccgacgaacttatcgatgtattcaattgcgggaacggaaaactttgaaaatgatgggattgtacccgcgcgtagtgtagaggcggggaagtacatttatcaagggcaagtcaagcactacaccgaaattacggtgacaggtgaccaagcacaacactctgatctaccacagaatcaacagattgtggccttgttagaacaatacattctcagcaaaaagaacacccgcaatacacaaccaacacctaaggattcaacaccttcagaggaccaataaaaaaagccccagaataacagtaaggttgttattctggggccttttttattggcactcattaattagaatgcttggtactttctttttgaactagagcaccaattgctggcaaattacccaagctatcgattgacttatttggcaagacaatggtgttattttgaccgtctgcgatgtgttccatcgcttcaatattcttatattgaagatagagttcgccgttattgactaagctggcgttgatcaaattaatttgatctttaacagcttcggcaattgttcgttcactttgagctttcccttcagcttccaaaatttgtgtttgtttattggcttcggcttctagaatattcgcttcttttaacccttcagctttacggattgcggcggctttgagcccttcggcttccataatgttggcttctttttcacgcgaagcacggagcaatttattcattgattcttggatgtcgtgggccacttgaattgaatcgatattgacccgatcaacgtttaagccgtagccggctgttacttcgctaagttgttcaaaaagggtttggttaattttttcggtgccatttaaaacatcgttcaagtccatgttcccaataatcccacgtaattgtgcacgggtgtcttggaccatacttagaacggaatctttatttttataaacgtacgcattgacgtcagtgatgtgatatttaatcgtttccgaaatcataacaaccacgttgtctttggtaatgacttcttgttcagcgacttttaaggggatttgtttcatattaacgatttctgtgatgtgataaatgaatggaatgaccaaatggaaaccaggatcaagcgttttaacgtagacccctaagcgttccaaaatcccaacttccccggtatgaatcaaggcaaatgatgaaaagagggtgactacaacaataactaaaacaagaatgactaaaatactgatgaaaatacccataataaaaactcccttttgtctggcttaatacgccagaatattgtggtgcgctgtcacgattaaagctaaaggtgtgacggccgttaccatgacgagtaagccagcgctagctggtccttcgacacggtaatgatataagatgccaaaaaaattaacggtgccggttgatttagcatcctgtaaagtaaacgttaaccccactaagcgttcatctaacatattccgcctccctttgttcacattgtatctgattaccaataaaaggcaactctaagtgacagtaacgaacaaaattgttaggtggcttgtctcgaatgcatgaagatagtaaactaagcgtactaaggctggaaatggaggaaccgtggatgagacgaaaagtgacgccgatttttcaagacagtttccaaaagcgctattggcgacaaataattatcggcattatcgcggtagctctgtgtcttggtggtgctatctggtggttgaaacaccgttcggatcgaccaagcgcgacgcaatatccgattctagggatgcaattaagtcagtcagatggttaccaagattttgacgggttaaaaaaggacggtattcagtttgtttatttaaaagcaactgaaggggccagttacaaggatgataatttcgacaccaattacagtcgagcaagtggcactggcttacgcgtgggcatctttcatttttttagttttgatagttcgcctgaacgccaagctgaccaactttttaaagcagttggcagccagacgggtgatttaccaattatgatctatttggattattataacgactatgcacaacaaccgcccgcacaaaagaaaacgcaaatggcactggcgcagctagtgaccttgattaatcaacattatcatcaaaattgtctcattggtggtgcacccagcttattaaaacggtatgtgccacacaaaggagactatccattgtggcaaactacgcgggaacagccaacattggcgactaagaacgggttctggcaatacacaatggctagtcagattccaaacagtgataatcagacgaactatcagttagcagtttttactggcaccaagcaacaatggcagactattaaatagaaacggagagaaaataatgattaaacacaaaggctggttattattaatcgcaatcgtggtgattttcatcggtggtagttggggaattcatagctattattacggtggggaagcctactatacacagattgtttcaaacggaacacgaatggaagaaaaggattcagcaggggaaacggttatcgattataactatcaacaagcagcctacaatgaagatggtgttaccaaaaaagttgattttaagggtaataaatcaacgccgcttaaacgaaatgcgtacctcaaattaatcgtcaataaaaataagggtgtggtttcatgggaaaaggttgccaaaaacgaagtcccagataaagctcaaaaaatgttgaacaaataaagaataactaaaaaggcccataacgctgagcattatgggccttttttaatagctattcgattggataatccatatcttcggcttcatcgtaaattgaaacgggccgttgattttcacaagtaatttttaattgatagccgtagtgatcgagaaagaccaattcgttttccgtgagggagatgacttgaccactcaatggcttatggtcgatttgcaccaacaagttcggagtaatttctaatgtgtgtttttttcgggtttggttgtcattaaaagaccagtgtccagcataaaaagtcgctactttactcgcttgagtcgtccgaactttttgctgatactggtgaatggtttgatttaaaattgcttgtggtttttgaaatttaaaaaatcgcataagtcacaccccaacttactattattctaccacgaaatagttagtttgcggacaattaattatcggactcacgactgtttttttaaggaatggttaaagaagtgaatagtggcggaattcttatcagtagaaaaacttttcgataggcttctagatctaaatcccgtatactggcagtattaaataagggagctgattataatgcaaacacttgggattattgggactaactggattacgggacaatttgttgatgcggcccgggaatctgaatcatttaagttaacagctgtttattcacggacggcagataaagccgaccaatttaaaacgaagtatcacgcaccagaagccacaagttacactgacttagacgggtttatgaatgccaatgaatttgaaaccgtctacattgcatcacctaatagtctgcactttgaacaagcgaagcaagcaattttagcgggtaaaaatgtcatcgtggaaaaacctgccttcagtaatccggctgaaatggcagccatgcaaacattattaaagcaacatccagaccaattcttattcgaagcagcacgtcatattcatgaggccaactttaagattgtacaacaagccatcaacgcattaccggcgatcaatggcgcgaccttgagctatatgaaatattcatcacgctatgacgctgttttagcgggtgaagaaccgaatattttctcaccacatttttctggaggagctttacaagatctcggcgtgtatgtcgtctatgatgccgtcagctggtttggtgtgcccgattcagtcgattatcaagctgaattgttaccaactggagtggatggtaaaggggtcgcaacactgcgttatccaacctttaacgtcacgttgatttttggcaaaaccgttgattcctatctaacgtctgaaatttatggtggccaaacgacgattgtcctcgataatgccggcacaatcggcagtgttgaccgctacagcgaaggtgggcaaaagattgagtcactaggggaacaatcacttgctaatccaatggttgctgaggcagaaaatttcgcggcgatgattgctaatcgtgacacaaaacggtatcatgaattattacagctaagtgaatcggtcaaccaagttttatatcaattaagacagtcggccggaataacatttgatgcagattaacatgacggaggcaatacatgagcgtttcaccactatttcaagcactatgggatgaacaaggatttacagaaatgtcacccatccaagaggcagtttatcaaccactgaaaaaagaccaatcaattctaggactggcacccacgggttctgggaaaaccctcgcgttttcattgccgttattagaaaaaattatgccgggcgaagggctacaagtcttaattttggctccttcacaggaattggtgatccaaacacgggacgtcattcaaccttatgccaaggcaatcgactgtaatgtccaagcgattacggggaaggcgaatgttaaacgccaaatcgaacggcttaaggccaaaccagagattatcgtggcaacgactggtcggttattagaattgagcgaacaacggaaagtgaaattccatacactccaagcgattattatggacgaagctgacgaattattgacggatagcgggctttcagaaacccgccatatcgtgcaagaatcacctgccgatgtgcaacttggcttcttttcagcgacatcaaccgatatcttattagagttggaaacatggttcggcgtgccaatcgaaacaatcgacgtgcgtgggattgataagacgggtggggaagtgttgcatgcatttatcccaactggtaacgctcaaaaagtgaacgtcttacgccatttagcacatcaaaagaattttagaggtttggtcatttttaaccaatccgcgcaactcttacaagctgcacaaacgttaaaacatcaaaaagtaacgtatgccgcactctcagggcaaggtcgccaaacagaacgccaaaaagcgctcaaagatttccgtgaaggtaagattcaactcttactagcaacggacgtggctggccgtggcttggatatcaccgacttaccttatgtgattaattttgatgtaccaaacgcaaaaatcacttacattcatcgtgctggtcggactggtcggatgggacgcacggggactgttttgacgttgggcaatcaacacgatgggcggaatttgcgtaagttattggcgcctgaatatgatcttgtgacccgttatttggtcggtgaccatttggaagccgaaaaaccagtgacgcctaaagtagcaccagttgctgcaacgaaagcaacatctgctgtaccaactactggtgaagcaacagaaggacaagtacaaaaggctacgccgacgacaagcgcgcgcaaagccaaattagtaccagttcgccaacagccagctgcaccattaaaaccaaaacataagaaaaaccgtaaacgaaatcaaaagaataagggctaccataagaaaaataatgactagtggtctaatccagattgagcgagaaaccttaacaacctgttaaggtttcttttttttggactagtccgtttgtgaaaaggttatcagtaattaattgacaaatcttaggaagcgattacaatataagtaagggttttctttcgcttcgtaaaatgcgatagtggcgaactctcacaatcaggaactaatttttgaaagccttttaatggattggttagtcattctcgaagaaatatctagaccaattaatgaatggttacgaaagtggttcacgatgagatgatcataggaggtgccatactatggcagaagaacagaacttagaagcaatcatgggcttaattatcaacggtgggaacgccaagagtagctcaatggaagcaatcatggccgctaagaaaggtgacttcgaaacagcagctgccaaacttgcagaagcggatgctgctttatcagaagcccataattcacaaacagatatgttaaccaaagaagcaagtggcgatcacatgcaagtgacattattgacggttcactcacaagatcacttgatgaacgcaattactttccgcgatttagcaggcgaagtcgttgacgtttacaagaagatggccggtgtaccagtcgattaaagtttggctaatgaacaaaaggactaggacaaaatgacttttgttcgagccctttttagttaaaagcaacaaatggcacattgaagagaagagtgggaacgggatggaaattaaattaaatttaaaaatgccagctagttatttttatcagaagattctggaatcagtgttgtttgatattaagcaacaaactggggataaactaactgaagcgcagttgcctaattattcgtacgacaagcaatttggcaagaatcgggcgacactgaagattacgcaactgattaaagatcagagctatcactacgaaacgacttctacccgggggagctatcaatcaagttacgatattttcgcgaatggaccgcagtctattgaagttatctatcgcgaaaatgccaaagcaaatggtaaattacaacaaaccaatgatatgttgatggcctttgtcatgggtttcatgcgtaaacgcggctttaagaaaatgttgaaacaaatcgaaaaagcatatcaagcagaataataagcaatgactttgagagaaagtaggatgaccagtaatggaataccatcaattagcaccatttcctaaagattttttgtggggttcagcttctgcggcctatcaaattgaaggggcctaccaagaagatggtaagggccgttctgtgtgggatgaatttgtccgcattccaggcaaaacgttcaaagccacgaatggtgatgtagcggtggatcactatcaccgtttcgaagaagacgtggcgctaatggcacgcgctgggctcaaagcctatcgtttttcgatttcatggccacgggtcttaccaaatggtaaaggcgctgtgaatgaggcgggcttagccttttatgattgtttaattaatacattaattgccaatgatattgaaccaatcgtgacgatttatcattgggacttaccgcaagcgttgcaagccgaatatggcggttgggaatcgcgtcaaattattgaagattttaccaactacgcaggcttattgttcgaacgcttcggcgatcgtgtgcaacattgggttaccttgaacgaacaaaatgtcttcatcactcacggctatttaacagcggagcatccgccagcagtgactgatgctaagcgaacttatcaagctaatcatatggcaaaccttgccaatgctagtgcgattaaattattccatgaaaaaggctatcaagggggcatcggacctagttttgcctacagcccaacttatgcgctgaatgcggacccagaaaatcaaattgcggctgataatgccgaacaaattaacgctgatttgtggatggacgtttatgcttggggccgttatccgaaattagtgatgacttatctcgaacgaaacgggattgcacccgaaattactgaagcggaccaagctttattagccgatccactcgcacatcccgattttatggggttgaattactatcagacgatgacagttacgactaacccactagaaggtggcgttggtttgaccaagcaaaatacttccggtaaaaagggcactagccaagcaagtgggttgccaggcgtctacaagaccgctgataacccctatatgcaacaaactgactgggattggaatattgaccccgaaggacttcgaatcgcactcagacgtattgagagccgttatggactgccggtcttaattactgagaacggtttaggggcttatgacaccttgaaagaaggcgggcaagtgcacgacgactaccggattgcctttttaaaggcgcacgttcaagccatccacgaagctattaccgatggcgtttcggtcatcggttacacgacatggagcttcacagatttattaagttggacaaacggctatcaaaaacgctatggcttcgtctacgtggatcgcgacgaaacagaagaaagagaactaaaccgctatccaaaagacagtttctactggtaccaaaaagtcattaaaagcaacggggaaatactatagagtgcgtagtcgaacgggttggctttgaggattaacagaaaaatacatattatggcgggtttaagccatagtatgtatttttaggttaaccggaaaaggcagttcgaagcagcacgtttaaaacaagagtgcgtagtcgaacgggttggctttgaggattaacagaaaaatacatattatggcgggtttaagccataatatgtattttcaggttatccggaaaaacgagttcgtttcaaccctccactttctttttgcctttagaacgcttagaatatagcgtaagaaatcaagacgaggtggcaatatgacaacgcaagaacgacgtacagcaattctgaatgcaattcaaaagagtgcgcaacccatcagtgccaaagtattagcgcaacaatataaagttagccggcagacaattgttggggatatcgccttacttcgcgcacaaggggcccaaattattgcgacagttagcggttattacgaccaaacgcagacgcaacaaacaatgccatatcaggcacaagttgcctgtcagcataatcaggggcagactgaacttgaattgacaacgattgttgaaaatggggggcgcgtgatcgacgtgaccgttgatcatccattgtatggtgaactgaccggtcaactgggaatcggcaccttgacagatgtcaaaggctttatgcaaaaaatggccacaatgccccatcagaaattactttcaacattaaccgacggcattcatttacacacgattgaatgcgcgtcagaacaacgatttaagcaaattgtcgcagcgcttaaacagataaatatttattataatgcataattaggtgtcttgacatctgtaaactctttttgtatgataggaccattcataacataagggagtaatgcgggatgacaaaagaacataggacacttttatgggctgcaggtggtgcatggttgttcgatgcaatggatgtggggatgctatcgtttgtgattgctgcgcttgccaaagagtggcaactcagtagcgcacaaatgggattaattgggagtgtcagttcaattggaatggtttttggcgccgttattttcggcattttagctgataaaattggtcgaaaaaacagtttactttgttccttattagtattttcgattggcaatgggatatctgcctttagtacatcgttgagtctatttctagtactccggttattggtcggtgctgggttgggtggcgagctaccggtagcctcgacattaatctcggagaatacgccaacggcatcgcgcggtcgggctgtcgtattgttagaaagtttttgggcagccgggtggttagttgccagtttactcgcctattttgtcattccagtttggggctggcgagtggtcttattgatcacgtcattgcccgccatctacacacttgtgttacggaaacatgttaaacaagagcatgaaccgacgacgattaaccgtaaggtaccattcatgcaacgattgcgtgttttatttgaaccagcgtatcgccaaagaacaattatgttatggctcgtatggtttttagtggtcttttcatactatgggatgtttttatggctccccagtgtgatggtcttaaaagggttcagcttggttaaaagttttgaatatgtgctgattatgaccttggcacaattaccaggctactttgtagcagcgtggttgattgaaaaatgggggcggaaacgtgttttaggtggctttctaatcggaacagcactcagtgcattattgtttggcaatgcaaactcagttgccatgttactcgtggccggtgcgctgttatcctttttcaatcttggtgcatggggggcgctatatgcttataccccagaacaatatcctgcacttgtccgtggaagtgggagtggtttagcagctggcatcgggcgaattggcggtgtggttgggccatttttagttggtgcgctaattcagcagggggtatcagtagccgtgatttttacactttttacgggtgcgatactattagcggctggtgccgtgttctttttaggtcaagaaacgatgaacgccgttttaacggatgaataaagatttattaaaatcaactttacaattaaaacaacagatgcgacaatatgactcataggcgctcgtggctcaactggatagagcaatcgcctcctaagcgataggttgcgagttcgattctcgccgggcgcactttgaagcaattgtcgtaaaagcacactagattaactagtgtgctttttaattggtgtaaaataatcaagcagaatgattacgctttcactttcagaaagttacggatttatgatttatattaggtgaaaatatgttaaaatagattcgtattcaaaaatcgcaacgcaaaagttgcaattaatctggaggctttttcatgtcattagttaatggtacagaaatctttaaagctgctcgtgaaggtcattacgctgttggtgctttcaacacaaacaaccttgaatggacacgtgctatcttaggtgctgctcaagaaactaacacaccaatcttgatccaaacatcaatgggtgctgctaaatatatgggtggttacgaattatgcaagaacttggttgaacaaacaatcaagtcaatgaacatcacagttcctgttatcatgcatttagatcacggtaactacgaagctgctaaagaatgtatcgaagttggttacaactcagttatgttcgatggtcatgatttaccattcgaagaaaacttagcaaagacaaaagaaatcgttgctttagcacatgctaaaggcatctcagttgaagccgaagttggttcaattggtggcgaagaagacggtatcatcggtgctggcgaattagctgacgttgaagaagctaaacaattagcagctgctggtcctgactacttagcagttggtattggtaatattcatggtgtataccctgaaaactggcaaggtttaagctttgaccgtttacaagaattagctgacgttattgacttaccacttgtattacatggtggttcaggtattcctaaggaacaaatccttaaagcaatcgaaatgggtatctcaaaagttaacgttaatacagaacaacaaatcgcatggtcaaacgctgttaaagaatactatgcagaaaacaaagatcaagctgaaaaaggcttcgatcctcgtaaagttcttgcaccaggtacaaaagcaatcaaagacacagttgaatcacgtatcgaatggttcggtacaccagctgttaaataattattgttttttcaagagtccaacttcggttgggctttttttgtggtttcatgctagaatgagagcaaaataaaggtggggataagatgacagttattgagcaatataatgcaggccttacaactgatgctgatcgaacactcgcactggcaatgcacaccattcttcgggcagtgttaccggacgcagagatgaagctggcttatggtttggttgggtattatcagcctaaagcagtttgctattttggcattaataaacggcacattgggttttatcccactaatcaaccgatggcccattttgcaaaagctgtcgcaccatgtcagaccggcaaagggacactacaattcgaaaaagatgtaacggcattaccaatcgagttgattcaaactatcgcgagttggcaattagaacacgttaataaataaggcttacccaaaatgggtaagcctattttttaatgaccactcgtcattttaatgccgagaattccgattactaataaaataacgaatagccaggttaataaagaaatgtgttcattgaataagatgatgccgactaaaatagctcccactgcgccaattccggtccaaaccggataagcaatgctcaatggtaatcccttcgtcgcacgaattagaaaaccgaagctgacgagcatgccagcaatcgtcagtaatgtgtaattgagcttagtgaacccaccactcattttcatagtcgttgcccaccaaacttctgccaatcctgcaatcaataaatcaacccatgccacacaatagaacctcctaataatatcggccacaaaaaaaggacagccaatcacttcttctttgacctaatgaagtaattaactgccccgtggcgacgattaaattaaatatagcatagcaaattttaggttaaaagtgaagcttagccgatagaaccaccaattaaataggtgacgaccatggttaagacgccggttaagacgttgcgcaaaacacctttgagtcggtttgccttgcctaacgttgcactcgtgtaaccggtcgcgataagggcaaggacaattgaaccaatagttccactgactttgtaagggtatggaattgctaggatggcgatgattggcagcaatgagcctaacatgaatgagaaaaatgatgaaaaggcggcatgccacgggttgaagtaatggtgtaattcaatattgtatttttcgcggagtgtgatgtcaagactgtctttttgcatgaacgctgaagctacctgatgtgcaagtggagtgggtaagccttttgattcgtaagtccgttgtagactggccacttcagcagcgtattcgttttggatggcttctttttgaagccgcatcatggatttctgcgtatcacgttgcgtgctgaccgagacgtattcaccgccacccattgaaaaggcgccagcaagcatgccagaaataccagcaagaaaaatcgtgtactgactttggtgggcgctcgcgacaccgactacgattccagctacagagataatgccatcatttgcacctaaaacgccggcgcggataatgttcaaacgttctgataaatggaaacgatgttcaagtggtgcactggcggataattctttcataatggcggactcctctggttgatttaacttcattatagctaattgagaaggattatcaatcgtttttgaacaatcgttcacaacaaaaacattgtataaaacctgttataccagtacatacgaatcattattactaacgaataatgatatagtgaacaaaaagtatgccaacagtctagcacatcaaaaagggtcgcaacaaaaaattttgtcgcgaccctttcgaattataaatgtgtcagtgcttggtagtagaagaatgccgtgattgcggttaagactaaaccggcaacgcacacaatgattagaccatcaatcgcttgtttctggtaggcgctataggcggttagtccaatgaagaaggtggttagacaaacgcagacgccaaggagcatgagccatgtaatcattagtcagcccagtcaccgtttctgaaaatggggacaatctgaccgtcgtgcgttaagccatcgatgttcatttgactagaaccgaccatgaagtcaacgtgggcttgactacggtttaaaccagctgcttttaattcctcttcagacatatctgtgccgccttcaattgaaaaggcgtaagcagagccgagtgccaaatggtttgaagcattttcgtcaaataaggtattgtagaaggtgatctttgattgtgaaattggtgaaggatctggtacaagtgcgacttcacctaggctcttgaccccagcatcggtttgtaagagtttttgtaagacatcgttgccttcttcagcggtggctttgaccactttgccgttttcaaaagtaaatcgcatgttattgagtgtgttaccagcgtaactcaatggtttcgtagaagaaatgtagccatcgacgttgttggcatcagctgctgagaaaacttcctcagtaggcatgttagcgacgaatgaacgaccatcactactacggctaggaccacccatccagatgtggttttcaggtaacccaattgtgagatcagtgccaggggctgtgtaatggagtgctttgtattgcgcagcgtttaattcagcggctttggcttgcagtttcttaccatgttgttcccaagcaaggattgggtcttctttatctactcgggttgttttgaaaatctctgtccataacttatcagttgcggcttgttcgtccatatcaggaaagactttctttgcccaagcgggactagctgcggcaattacaatccaactatttttgttggcttgtgttgcttggcgaactttaagcattgcttgaccgtttgccttttgaacagcagcgacccgatcaccatcgagacctttaaggttatcaggattgctcgacatcaccgaaatccgtttggcgttatttgctaaccagtaatcgtattcttgtttctggaagtctggcacgttaacgaggcgatcttcggctttgtgttgcatattgatccgatcgatgtcatcatcttgccatttgataatcacttcggctgcaccgaggtcataacaagcagctgtcatatcacgggcgaattcagcttgcgtaacagcgatttggagcaccactgtgtctccggattgcacgttgatccctgtcttagcgactaaagcggcgtatttttcaagattatgttggaaagtagtcatcaaaaattcctccttaagggcgatttaatatgtttatcatagcacatggcgatttaaaaaactcgtaaaacagataaaaacgttttcatgttatttaattttgtggtagagtgacagtagataatattgaaaaacggattgatcggttaaggagtgggaacgatggcacggacaaaacggattaaagcggagcaaattctggataaagcatacgaaatggtattagcggatggtttaaaagcaattacagcgcgcagccttgccaaggcactagactgttcgacacaacccatctatttagaattcggtaatatggccaatctcaagcaagccattttggaacaagccaaggcgcgtttggtgtggtatgtcagtgaagaacaacgaacagatgatgccttagtcaatctcgggattggctatattcattttgctacaatcgaaccagaactttaccgtgcgttatttattgataaccactttggtaaggatgaagcacaacttttcatggggcaattgacacaaactagattggaggactatcaaccgttaaaaacggttagtgagtcagaacacgaacgcattattaacgaagcgtggatcattattacgggtttggcgaccttaacgaatgcgaagttggtacactatagtgacgcagaaatagacgcgatgctcaagcgaatgttgaagcaatgtttttaaaaagagacgcctaaaaggcgtcctttttaatattcagactgttattcatttgactcaagggaataagactgcaatggattggcaaacccttataaaacgtgtaatataggaggtgttaacttattaaatggtaggaggcaaatttgtgtctaaaattaaagtaatgactgtttttgggacacgaccagaagcaattaagatggcgccgctagtattagcattgaaagaacgcgcagatgaattcgaagctgtgacggtggtaactgcccaacatcgtcaaatgttagatcaagtgcttgaaatttttaaaattaaaccagattacgatttggacgttatgaaacaacgacaaacacttagtgaaattactagtaacgtattaatgaaccttgataaagtgattgcaactgaaaaaccggatatcgtattggttcatggggatacaaccactactttcgcagcaagcattagtgcattctacaatcaaacagcgattggccatgttgaagcaggactaagaacttgggataagtattcaccattcccagaagaaatgaatcgccaattaacagatgtactcagtgatctttattttgcaccaaccagtcaaagtgaagccaacttattacaagaaaatcatccacaaaaggctatttatattacagggaatactgcaattgatgcattgaagcaaacggttcaaagcgactacaatcattcaatcttggatgttgttgatgctgacaaacgaatgattctagtaacaatgcatcgacgtgaaaaccaaggtgaaccaatgaaacgggtcttcaaggtaatgcgccaagttgttgaaacccatgatgatgttgaaatcgtctatccagtgcatttgaaccctgttgtgcaagaagcagcgcaagatatcttaggcaatcacccacggattcatttaatcgatccattggatgttgttgatttccacaacttagctgcacggagtttcttcatcatgtctgattctggtggtgtgcaagaagaagcaccatcattaggcaaacctgtgttggtcttacgggacacaactgaacgacctgaaggggttgaagcaggcacgttgaagttggttgggacacaaccagaacaagttcatgatgcgatggttgaactgttagatgaccaagctgtgtatgatgcaatggcccatgccaagaacccatatggggatggacaagcatctcaacggattttagatgcaattgcttatcattttggtcaatcaaaagaaaaaccagaagcgtttaaataatgagcattgaaaaagccctcgaccattatcattttgactgataatggcgagggctttttttgatgagataaacgtgcggattcaaactgttttttgtcttaatactcagttgctaagtgtaaccaaacgcactttatttcttttctttcacaatatacactggtctgtttttaacttctaggtagattttgccgatgtatttgccgacaatccctaggcataggagttgtaaaccgccgaccattaggataactgaaatgagtgatggccaaccgcttgttggatcgccaaaaatcaaagcacgaataacgatgaagattaatgcaagcagggcaatcgcgaatgagaaaaagccgacgaaggacgcaatggctaatggtgtttctgagaaagttacaatcccatccaatgaatatttgaagagtccccagaatgaccaactggtttgaccagcaacgcggtcttggttcttatattctaagtacttggtgtcaaagccgacccaactgaaaatcccttttgaaaaacggttgtattcagacatctctaagatggcattgaccatctgccgagtcatcaagcgataatcacgagcaccatccacgatttcagtttgtgaaatccggttgataatcttgtaaaattgtttagcgaagaacgaacgaacggggggttcgcccgcacgtgttgtccggcgagtgccgacacagtcataaccttcgacttcaatgccgtgaatcatttcgggtaatagttcaggcggatcttgtaagtcaacatccatcactgaaacgtagtcgccagttgcggcttgtaagccagcatacaaggcagcctctttaccgaagttccgagagaatgaaatgtagtgaacgtgttcagggtcttgtgcctgtaacgcgcgcatttccgccaggctttcatcagcagaaccatcgttaacgaagatgtattcgatgcggtggtcggctagagtagccgctactttctcaactgctgcgtagaaaagcggaattgattcttgctcgttataacagggtacaataattgaaatcgtcttagtcatcttaatcctccgaagtatctttgaaaatccatttgctaaatacatagttcgctaaaatcacgataatctgatctagcactttaacaagcatgttgggccataccaataaggaaatcccaacaaacataattgcagtatccattataaatgatataccacggaagaaaaagaaactagccatctcgcgggaaaagtcctttaaagttgtatattttgactgaaagacccacgttttattggtgaaaaaggcaaatagcacggacaagaaccaggcaatcgtgttgctgacgagataattgatagttgtatagtggtctaatccgaagaaaacgaccatgttgactagggttgttaagacaccaaagaccaagtacattaattgttcccagtattcttgaatgagttgttgaatggctttaatcattgtgacctcttttcaaaatagcattgtatcgccggagaatccgcccccggagtgccatttgttgttctgtttttttgaaagtgtagcgggtggtgatgtagttgacaatgccgacaattaactgatcgataatcttggcggtcatactctgccaccctaagaaggagatggcgacaatcatcaaaccgttatccaagaaaaaggatacaccacggaaaaagaaaaacgaaagcacttcacgacacacagcgccaaacgtggtgtatttggattggaatacaagcgacttattggtaaaaaagccaaataaattcgcgacaaaccacgccattgtattggcgagtaaatacggccaaataatggtgtggcgaaatacccagtaagtaaaaatattaaccaacgatgctaaaaaaccaaaaatcgtataggtcaaaaaatcgcggtatttaaacactaaccgtttaatgaaagccataaagacagctcctagtttgatttattaaggtctaaaagaccaaaagaagggccgcggtaaaaagggacgtaaccgcggcccagggaagattggttgaaacgtgcttgttgaaacatacttctgcgcttaaccaaatttaccaaataggtgattgcatcacctattcggcaaatccagttaatgctcaaagcataaccgtttcaaacgcactctgccttgaaacgtgctttataagctagtatcctgtgccagactaggttagtgctcggatactgaccgagcttataacgcactctgttttgcgacaatctctgatacgaatttttcaagatgttcgatatcttctgcttctgctgatagatcgactttgacaacgtctgaaccctttgttgcgccggtttgttcgaagacggctgcaaaatcatcaaccactttacagaagtcatcgtagaacgtatcaccggagccacagacaccgtagactttaccagttaaatcaatatccttgagatcttcgtagaaatcaacggcttcatcggggagatcgccatcatcgccataggtgtagctgcagacgatacagatatcgctgtcttcaaaatcggcaggatctgcttgagagatttcagtggtttcaacatcgacgttcaaactttcgagggcttcttcaacgatttcggcaatttcctcgttattgccggtcatacttgcatagactactttagcagttgccattattgggacatcctttcacgtacgcggcgctcagtggccgcaattaacgaattatactataaggcattatagcaaaagccccttattaagaaaaggtgcaacggctctttcacggttaattgaactaaaaagcgacgattcgtccattttaatggcagatagcgtataatatagaaatagatacaattaaaggctacaatggtaacaatattggaggtttcattttgattacattaaaatctgaacgagaaattaaagggatggctgcttctggcgccattattgccggcgttcatcgcggtttgcgtgacatcatcaaaccaggtatttcgagctgggtaattgaagaattcgcaaacgactacatcgaacaacacggtgccaaagcatctgaaaaaggctttgaaggctacaagtacgcaacttgtgtctgcgtgaatgaagaagtggcacatgccattccacggaagaacttaattctaaaagaaggcgacactgtcagtgtcgacatgaccgttaacttggacggttatgaaagtgattcttgctggacttatgcggttggcgaaatcgcaccagaattacaaaaattaatggacgatacgcgcaaagcactttacttaggcattgatcaagccgttgtcggcaatcgcctaggtgatatcggccacgccatccaacaatataccgaagttgaaaacagctacggtgacgtccgtgaattgattggacatggtattcaaccaacgatgcacgaacaaccaaacgtgccttcatacggtgaagcgggcaagggcttgcgccttaaagaagggatgaccatcacaattgaaccaatggtcatcttaggtggtacatggcacatcaagtcaaaagaagtccctggcgaagactgggaatattacgtctcagcagatggcacaccatgtgcgcaatatgaacacacaattgcgattaccaaagatggtcctaagattctaacctcacaagatccagaaatggatgctaaatatttactataaaattagaaaccttctctaaaatgagaaggtttctttttttgctttcagaaaactattagcccatagttaattcgtgtataatagaaatgataaacatgccttaagaagtcgggaaaataagcctttcaggtagaacgactaatgtgtaaaagagaatttggagtgacatatgacagtagacaatcaaaaccagttaccggtggtaaaacaggacttatccagacggcagaagttgattgctgtggtgaagttaatgatgttgcgttcatcagaagcaagcattagtgataattcgaaggtaatcgcatattattcgttattatcaatcttcccactattaatcgttatcgggaacatcttaccgtacttccagttagatgtaatgagtgtggcggattacgtccaaacggcggtgccgcccacgatattcgacaagattatgccagttctgcagtccctattgaagaaacgcaatgatggcttattgtccgtcgggatcttggggacgttgtgggcagcgagcatggggattaatgccttaaaaaatagtattaaccgcgcgtatcgtgttgaaaaagttcagaactttgttttaaaacgcctgatttctttggggagtacattattattactgctattattagtcggtttaattgttgtttttacattcgggcaacaagttttggaattattagtcccaatctttaacattcctaagacatacgttaatatttttagtagtttaaaatggccagtgacggggatcgccttgttcctactgctgattttcatctatttcttcgttccgaatgtgaaaatgcgattgcgaagtgttctgccaggggcagcactgacaacggttggctggttaattcttgcacaagccttctcattgtatattcgttacttcggcacgtcatggaatagttacggtgcaatcggtgcggtgattatcttactcttgtggctgaattattccgcaacgattctgatggtgggggctgtcttgaatgttgtgattgaagaagcactgcatgggcatgttaacgccagtcgcggtaaggttcatgacttcattgcgcgtcggcgcgatcaaaatgaatgacagccgaaaaattaatgagacaaagcacaaatatgaattgaaacgttaaccaattatataggttgtaagaattcgggaatcaatcggatgattacaacctatttttagtctctaaaattaaaattatttatctcaaccgatatgtcaaactaatgtttttacatatcggttttttgatggacttagatttcgtaaaccactttcactttcgatactttaaaaatatttaattatttaaaaatcttgaatattgaattaccgcccaatgttaagggggttattcacaatttagtgtgaaaactaagtgttttttattaaggtgtattccagaaaaagatttcctttttaataaaagttatactataatagaaaatattgtagtataaatagtatgtaatgtgattgattatttttttgtttatttttcgaggaggatacgaaacggatgactgcagaagaacagaagcgacaccatcaccataagcaccggcgcagagggtggacattaacaaaagtgattttagttgttcttggggtattgattcttgccgggggcgcattcgcagctaaggtctatatggatgttaatcaaaccgccaagacagtgtataaatccaaaggtaagacacaaaataagcgcaaagtttcagaaaaagtcgaactaaataagaagacgcctttctcgatcctcttactcggtacagatacaggggaactaggccgaaccgaaaaaggccggactgatacaatgatactcgcaacggtcaatccaacgactaaggaaaccaacatgttgagtatcgcccgggattcacgggtaccaatcgttggctatgatcaaacggctaagattaatgccgcgtatgcctatggtggcattccaatggcagtcaatactgtgcaagcattcttgaacgtaccagtggattattatgtcttgatgaatatgaaaggtttggaacagttagttgatgcagttgatgggattactgtaaataataaattcgctttcaatattgatcagtatcattttgataaaggacaaatccgcttagatggaatacatgcattatattattcgagaatgcgttattcagattctcaaggggattttggacgacagctacgacaacaagaagttattaaagcagtgttagaaaaagcaacatcattaaatatggtctctagttataataatttcttgcaaattatggcagagaatatgcaaacaaatatgacattgaaagatatcttaaacattcaacaaaactatggggatgccatgaatttcaagacacttcaactaaaaggaacgggtcaaatgattgacgggcaatccttccaagtgatgaacccaaccgaggtagcacaaatgtcgacacgtttacggaagcaattagatttgaaataatcatgaaagaagctaaccagtgatggttaacttcttttagcgtggagtaaagtaattataattgttaattaattttggagggtatcatggagcaaacgattaatattgaacagattttcagcattttacgaaagtatcgccgccttattctatcatcaacggttgtatgtacgctgttagcaatcattattacgtttttcttgattacgccacaatacagtgcttcagcagagttgttagtcaatcgtaaacaaagcactgatgctggtgcacagtggaatcaagtgcaaacagatgtgcaaatgatcaatacttacaaggatttaattaccaaaccggccattatggattcagtagcaagtaaaataaataaggggaatgggcataactatactgctgatgaacttgctagcatggttagtgttgctaataatcaaaattcgcaagtcttctcaattacggctaagtctgataacgcctatactgcggcagacattgtcaataccacagcacgaacattccagaaaaaagcaccgaaaattatgagtgggactgacaacgtttcaatcatttcagaagccaaaccgaatttaacaccagtgtcacctaaaaagaacttgaacgtcttaattggtttggtactagggctgttattaggaattgggtttgcctttttacgggaattaatggataagacggttaaagaagaaagtttcttaacagaagaacttggtttaaccagtttaggaattgtcaataatattgctgataaagatttgattaaaaaagcgattgtcaatgtaagtagtagtcgcttatcgagaagaggataggaaaatgggcttatttagaaaagaaaagggtttagaccaagcaagtatgaaggaaggcgttggcttaatcacgttaacggaaccgacttcagtcattgcggaacaattcagaacggttcgaacgaatattcagttctcatcaattgatcaaaaattacggagtgttgttttcacatctgctgggccatcacaaggaaagtccacggttagtgcgaacgtcgcagttacttgggctgatcaaggggttgatgtgttactagttgatgctgatatgcggcggccaacagttcatcaaaccttccaagtaccgaataaaaaaggcctaacatcacttctaacagaagaaactttcgacttaaatagtgcgattcaaaaaacgccggtggatcatttattcgttctaccatgtggtgtggttccaccaaatccatcagaactattaaatacgaagaagatggataaattaattgccgaattgacaaagcattttgatttagtgatttttgatgtaccgcctgtagtatcggtgacggatgcacaaatcttagcaagcaaagtggatgggacaattttggtggtaccacaagggattgttgaaaagggttcggttgccaaggcaaaagagttgttagaagtcgttaatgcccgaattttaggaacaattatgaaccgcgtgaaggctgagaatacgggtggctactatggtggttactacgggacagcagaaagtaagtaaccaaaaatcttggggggagtaaataaatgatagataatactaaggtgcaacaagatgagaattttattaaaaaagatgtactagatgaaattaacggagaaccaatagaatcattaagttttagctaccgtataataaaacgcttttttgatattataatttccggagtgatgttgattatcattattccggtttttgtcgtattttcaggtatctacttgataggtgataataaggggcctttattttatcggcaagttcgtgtaggtcgtaacggtaaaaagtttaaaatgtataagtttcgttcaatggttgttgacgctgataagaaactactagagaataaggaactttatgctaagtatgttgcaaatagttacaaattacctgcaggggaggacccacgagttacaaagtttggtagttttattcgaagaacatctttagatgaattgccacaatttattaacatctttaaaggtgacatgagtattattgggccacgcccgatagttgaagaagaactagcagagtatgagacagcagaacggattaataaactattgtctgttacaccaggcgcaatgggttattggcaagctattggaagaagtaatattgaatatcctgagagatgcgaagtcgaactctattatgttgatcacgtctcattattatttgattttcaaattatttttaaaaacattgttagtatttttaaaaatgatggtgcatattagaaaggatagtcataatgagaatactgcatcttgctgagtatgcttcgggtggtattgcaacatatctaagaaataccattgaatatcaattagataatgagaatattgatgaaatagttttgctaacttctaaaaataagtcagaggagtttaattttaaatcaaataaatttaaaagcgctgtttattcctatataagaggattaagtggtgtattaaaaatattaaaattaagaaaagtagtcgatgattataatccggatgtggttcatatccatagtacctttgctgggttgattagaatttcttatcttttaaaaaatcctaagtataaggtagtttattgtgcacatggttggagctttattcaacaaaataaaactccatttaaaaaatatatctattctttagttgaaaggctacttacgattaaaacggatttaattgtaaatatatcgcaaaacgaacaaaacattgctgaatattataaaataccaaaagaaaagatgaaaattatttataattctattcctgatgatcgagaaaaattaagtgacaatacattaagacgattaactcaagaaaaaaaaaataatagaaacttattattcataggaagatttgataaagctaagggattagaattcttaatccgaaatttagatttcaaaggtaataatatcgggctttcggttattggcgaatcaattttgaatgattcagatagtgatttaaaaaaaccaaatgtgaattatttaggatggattgataatacagaaatcagttcgtatatcatacaatccgatgctgttattataccatcgttatgggaaggatttggattggttgctcttgaggcaatgagagaaaaaaaagtaattatttcttcaaatgcaggagggcttccagagattattgaagataataagaatggattaatgtttgatgcaggttcaaaaaaatcattgcaagaagtgatagatagatttaataaactaacgcctgaagaacttagtactatgggagaaaatggttataaaaaatatcgaagtaagtataattttgatttattaaatcagaaactaatagatgaatatagaatgctagaggagagatacaatggttgaagtttcaatattaatggctactagaaatggtgagaaacatattcgggaagctattgaatccctcttaaatcaaacattttatgattttgaattaataatatgtaatgaccattcgacggataaaactgtagagattattacaagctatatgaaattggataacagaataaatttaatccacaatatgaagaagcctgggcttacaacgactttgaatataggactagaaaaatgtaaggggaagtacgttgcaagaatggatgatgacgatattgcacataaagatcgtatcgaaaaggaatatgtttttatggaaaataatagcagtatagctgttgtagggtcagatataaattattttgaccaaaatggtgtgtatggtgttagcaattttacgagagaaccagataaaattgatatttggaaagatgatatttttgcaaatcccacagcaatgatcagaactgatgttatcaagcaaattggaaactacgatgagtcagatgacgttataagaattgaagattatgactattggtgtaagctttatgccaatggatttaaaggcgttaatcttaaagaagtgttacttgattatcgagaagataacaatgcttttaaaaagaggaataatattagacgaattagattggtaagaagaatgaattattggtctaaccccatgggaattcaaggaatggtgaagggacgtatgttatatgagttagctaaatgtatggtcccacaaaaagcaattcaaatatatcacagaataacatataagaagtagttttctaggtttatggatatgtaatatatttgaattattaaaaacagagtatttcatatttttaatatgaagatagtattaaattattgtttttatagagagtagctacgaatatatattttcaattcttattaatgctattcatacagggcatcgtatttaaaactgggagagaaaatatggctatatatttttattcattattagcaacattaattatggggtgtataagtgacgtagcttataaaaaaaataacattagcaaaaatagtggttggcaagcattttttataagtttaccgttggcaacagttgcgggtctaaggactatagacataggtacggatattcaggtgtatggccgaggggcttttaaagcagcgacttcatctcaatccatgttaagttatgtaacggctatggatgcgcggtatggtattgagcatggctatgatatattgaattttctagtatcacgatttacagataatataaatatatttctgtttatattatctttggtaactttaattccatttgtattaggtgcattatcatttcgaagaacattttcaattccaatttggattcaactgggagtgttctggggattaaattacggtggtacgcttaatattatgagacaatctgtttcaatgagtattgtttatttagctgtagcaattttactttcaaagagaggccataatattaggaactactttcttttattaatattagcatttgagtttcatcgaacagcagtcattgcaatcatattttttattatatttgaatacgtcgaagtaggaatggtaaaagttaaactaagtgtccgtttgcctgcattgatattgtcaatttctagtatagccataataggtgcgatactcataaaaaaactagcaaatactggttttttatcaaaatatcaatcatatactgacagtagtaactggttagttcaaacatcctatgggtggggaagaatcttattattatctattggagcactactagtagcagtactttttggtttctatttatacttatctactaataaaatatttaaaaaatatgttgttttcttattgttagtattaataattgatatagcaacgcaattttcagctagttcaggtaagctttttactagactaggactatattttgtaatatttgaagcgataagtttaccactagggatgaatgtgttgttcaataaacgtataaaaatagttggctacctaatagtgttgggatatgtaatttttgtattcttcacagtaactaagtctggttctggcgaaatatatccatatcggtggattcttaatttgggataaggagaggtgtgaaaatgaattttaaaatagatatcgttgttagttgggttaattcaaatgatcctgaatggcaagaacgaatgaataagcagttacaattgatgggaaaagaacagttaatgattgatgaagaacgatatcatgaattcggtttttttaagtattggtttagatctattgaaaaatttgctccttggataaaccatgtttatgtattaacagatagacagcgccctgatttttttattgaaactgataaggtaactattgttgatcattctgaagtaattccaaaagagtatctaccaacatttagttcaagtgtaattgaattgtttttagataaaatccctggaatcagcgaacattttatttactttaatgatgacatgtttttgaatgcgccggttcttcccgacgacttttttgataaaaatggggtgccgaaggattgcgcaatctcatcagtcttacaacctgttagtaattttgaacatttaccatttaatgacatccagataattaatcgtaattttcctaagaagattgttataaagaaatattggaaaaaatttttttcattgaaatatggaggagccaatatttttaaaagtattttaacattaccgtttagcaattggagtgcttttaaaattcagcatgtagcctattcattaaggaaagcagattatcaaatgcttcgtaaatatgctaagagtgaaattgaaacaacagcgaaaatgcattttagatcaaataatgacattaatatatggctattattagagttaagatatgtgacaggagagtttagcccaaaatccgtaaaagatggggcctattataattttgatgggactaacagcctgcttgcttgtttaagaaaaggtaaaactaagcaagtctgtataaatgatgttagtaagagtaaaacattggcagaaaaaataattgaggctaatcaaataaaaaaagtattagaaagcaaatttccagaaaaatcttcagttgaaagtggagaaattggattgactcaagataactctcatcatgggctttaaaattgtgggatattttaagagaattgtatcaaaacttcttgattttgaaatctgcaattggtgcagattatgttgtaaaaggaaaggaacaagatttatatgattaaactatccattattattccaacctataattcagctgaatttatacccgaccttgcaaatgctttacgacagttaaaacatgttgaagttttgtttattgacgatggctcaagtgatgaaacaatcaacgtaatagaaaaagaatatcagcaaacagtctcagataagtcaaatatcagcataataagatcaaatcataaaggcgtttctacaagtagaaatattggtatagaaaaggctagaggagactatatcacttttattgatgcagacgatttgttcaatgtaaataatctagtcaagattattaataaattagacactttacgtgaagatattatcttttttcaaaatgggtttaatgatatcacagtaaacatgagtgaaaatgataatcgatatgaaatgattgatgcagttgtacttaagaaaaatccatttcaacagaaatttatccagcaggcaccatgggcgaaattgtttagaacaaaatttttacaggtagaaaaaatttattttccagaggatgttcaatttggagaagactttatatttaatgtagcgtgtttagaaaaagctaaaatcatagcttttaattcacttggattttacagatatcgaaataaccctaattcagtttcccataaaactagctatgatgtattacttaattcagagcgtttcttttcttatttaaaaaaaatattgggaaataattcgaaaatagttaaagaaaaagttgcattagcaatcattaatgatccaaagagagcaataagaggtggaaaatctaaatctgatgtaaaagagctaattgattttctatttgatatggaatattcaatagatatattgaatttaaagcaaagattaattttttatatgattaaatcacatcaattatggctctttaaaaatctggtattaattaaatctaaatatctaaataaaccggaagaattatttcaggagatttaggcattagtataattggcacaaatgcaggaaataaaaaattatgaaaatagcaattgatacaattatagaccattcgaattatgaaaatagtctgcagaattatgctacgcaaggtattctaaagcgattgggacctaatattattaagatacagaattaagaagacgaataaagctcgacagatgcctgcatcaatggaaatacaataaacaacgtagtgaaaacacgaatggtttttcttttgataatgaaatggattgctacattgttgagagcagtcaagtatagaattataattttggttggttctcaagaagagggctattgattgttctagtaatttaaagattagctatatcacagctttttgtgtgaataggagaatatatagatgggttaaataacttttacaaaatattgatatctatttgggatagtttacttggctaataatttaagtggaaatagaattaatgttgggactgttagcaagatattatatatcttttttatcgttaagctaaattaagacaaagaaaaataataattttaatacattatactaagaaacataaattaagtgtttatgaatggagtaagcagatgcgcaaaagaatactggtaatcggctattttaaggggaacctaggggatgatttatttttaaaaattttaacagatcgatatcccaatgaggtttttgaaatattaatagaccctgcggttgcttcaaattatatagatattaaaaatataaatatagtaaagaagaatctggtattcaaagtatttaataagatagcacatattttttcaaaaggcggaatatatgcacttttattaagaaaatataaagcagttgttgagattggcggttcgattttttcagaaaaaaatcgagaaggaattgtaacaggtggaagaatctatttatcagaacatatggaacattattttgtaataggaagtaattttggcccgtatgaaacacaatcgttcgtcgataattatcaaaaattttttagaagtatcgagggggtagtctttagggattcagcatccaaaaaactatttaattcattgaataatgtaaaatatgcgcctgatgttgtactaggattaaaggatgaggggaaagatatagacaaaaaaccttacgtggccgtttctgtaattgatctaatgtattcagatatttcgagagatggttccttaaagaaatatgtacaagattatgagaatgcaattcagttagcgttactacagttaattgatagtggttttaacgtgaagtttattccattcagtaagatgcaaaatgatactgaggttagttataagatacaagataggttattaagattaagacccaatgctaatattgaggtatttgaagatagtaatattcaaaagatattacaggtaattaaaaacagttcatatcttttgagtaccagatatcatgcaatgatcttaggctgggtctatgagattaagcagcaggttttaagctatagtggaaaaatggataatgtaatgcgagacttatttcccaatcaatattgttactcaattagatcagggaagcaatatgctcttgagatagataaaatgaatactgtcaaaaatgctgaagaacttaatatgcaggcgcaagagcaattctattatttagattcgtatttacgtgaagattctgtggaggatatacatggatagatataagaaattattctctaattcgattgttttttcagtcggtaacttggggagtaagatgattacatttcttatggttcccctttacacaagatttttaacaacaagtcaatatggtaattctgatgttattagtacaatagttagtttattaacacctatcttaacattatcaattattgaagcagtatttagatttgcactagatgatgaatctgataatggacaggtgctaacgaacggtttctttattagtcttgcaagttttatagtatttctttttgtattaccatttattagaaatatcaactacgggatatatattgtcttattaacttatgcaagtgcgttagaatctacacttcagcagtttgctcgaggtattggtaaatctacactttatgcagcaactggaatagttatgacagttgcgactgtattaagtaatcttttattgattgttgtaatgggatggcaattacaaggttacttagcgtcgattgtagttgcacaatttgctggaatgatatttttagtgtggcgtctaaaagcttggcgatatattagtataaaaaatattaatttagatttggccaaaaggatgctagtttatagtattccattaattcctaatatggtttcctggtggttgagtaattcggccaataagatatttatttctgctttattaggagcaactgcgaacgggatatatgccgttgcaaataaaatcccatctttaatatcagtattttattcaatctttacgcaagcatggcaaatatctgcagttgaagaatttgatagtgaagatgtaggggggttctttagtacagtattagcggctacttttagcgtattatttattggtgtggcaggcttaactctgttttccaagatacttgttttgcttttatcaacatcagcttattttgaagcttggagagttgtaccatggctagcactagcggtattattctcaagtatatcttcatttttaggtacggtatacacgtcatcaatgaaaactacggcactttttacaacaacgatagttggagccattattaacgtagttagcaatctagtcttaataccattactgggtataaccggggctggtgttggcgcttgtatttcatttttagtagttgtactcctaagaattagagattcaaagcgttttatacaactaaaaattcaatggagaattgttttaacgtcacttttgtgtatttgtttagaaattgggattctttatacactaccaggaatagtaggatatagtttagcttcaatatgtgcacttggtgtttttggaattaatagtcgtatattatttaaagagttaaagcatttttttaactagaaaataggaattctaaagaatgatatagattatggtgaatctaaaataatgaagaatatttaaatagttggatgaataagtggttgcccacacgatgagcaactattatatcattcggacttcatgggacttcgaaagattcattgtagacgcggactttaactaattttatggtatatattgttcaaaatgatgttaatgatggtttatatcaacttttaaaacgtggtatgaatttaccagcgaaatcttgaaggataaagatgtggaagtgagtccagttacatcagatgaatatcctcaaaaagcattccgtccaagacattcaatcatggatttaacgaggatcaaggcaactggatttgaagtaccaacctggcaagatgcattacaaaaatttatggcaaaaatcgattagtgagcttaaatactgtttattctaaaaaaggggaaattagataaatgaaaaatgttttaataattgggggaacgagtgggcttggttgggcgttggctaatgaattagcaaatgatgatcaaattcagaatgtttatattgtggggaggacgctacatactgaggtggagaaccctaaaattattttttttgcacataatctcttaatggataattttaatttctctgaacgttttaatgatattgacgcattatttatcacgattggtgccggaagagtcgctaaatttgataatctttctgaaaaagaaattaatatggaaattaatattaattacaaagctgtagcaactgtgctaaagcagttttatcctagaattcaaaaatcgaatgattttaaggttgctgtaattagtagtattgcaggcatgattaattcgccacttttctctgtatacggagcatcaaaagcagcgattatggcattaattcaaagtttaaacattgaattggaaaaagacggctctaataatagaatcttagatgtaagacctgggcatattgctgggacacgttttgcaaataataaagcgattgatacaaaacctgctcaaaaagtggctgttgaaataatcactgctgtacagaaaaaagaccagattttaattccaggttatgaggaaacgtataaagcagttattgaacgaaatagagaagattctcaagaatttggtattaatagttatgattaggcaaattacgatgctgacaaatttgtccaaaaattcggattaaatttgcaatctaccaatatgtctttttttaattattgggactggtaaaaaaaaccattttttggtatgcttgcactgagctagataataatgattataaataactaactttaaatttttatttggaggttctgaacatggcaattacacccacagatgcacaagacgtttttaaagatgctggcgagaacatcattttcgtcacccagaaattgaatcggcaagatgccgaggcggacaaagcggctgttaccgaattagcagcgcgcattccagcgatcatcaatagcatgaatatccgttacccagatgcccacttacgcgtggctttcgggattggctcggatgcttgggattacttattccctaacgcaccaaaaccaaaggaattggaacccttcaaggcaattccaagccctaaacatgatgccgtcgcaaccggaggcgatcttttcttccatattcgggccaaagaaatggcggtttgttatgaagtattagatcaaatgatgcaattcatttctgataacgcaacaacgattgatgaaacacacggattccgttacttcgaaggccgcgcgatcatcggcttcattgacggtacggaaaatcccgctatcgatgaaactgctgaatacgcattagtcggcgatgaagatccagaattcatcaacggttcatacgcttttgcacagaaatatatccatgccatggacagctggaaccatacttcaactgaagaacaagaaaaaacaattggccgcaaaaagttttctgacttagaacttgctgacgccgaaaagccaaccaacgcgcacaacgttgtctcacaagataacgaaggcggtgtggaacataagattgttcgcatgaacgttccatacgcaaaccctggcgaaaaaatgaccggtacttactttatcggctattctcgaacatggtcagtgacaaaacgcatgttaaccaatatgttcgtcggcaaaccagccggcaattatgaccacctactcgacttcagtgaaccaacaactggtgccctattcttcatcccatcaaaaacaacactagcaaaaatagcagaagaagaactatagagtgctgactcaaacgagttagacttttaggattaacgtaaaaacgggcattatggcgggtctcagccatgatgtccgttttgtagttaaccggaaaaggctgtttgagaagcacgtttgatataaagtgcgtttaaagcggtttgcctctgagcattagaatcgtaccgtgaatgagcgccaaagacgatcgtttacaggtacgtggctaagcgcaagaggcagctttaaaaagcacgtttgatacagagtgctgactcaaacaggttagcctttgaggattaacagcattattttctgagcatccaattaaccaaattgggtgcttttcttttactttttaagcctgttaattgacttaacaaccatttgattggtacactacacttactaataataagaaaatgaggctattcatatgtcagaaacaatgcacgctgttgccatccaacaatatggtgacgaaaaccaacttgaaatgattactttaccgatgcctacaattggtgaacaccaagtcctaattcaatctaaagcgacagcaatcaacccactcgactggaaattacgtgaaggtcatctcacaagcatgttccaatgggaattcccaatcgttcttggctgggacctttccggggtcgttgttgccgttggatcagccgtaacagaatggcacgttggtgatgaagttttcgcacgacctgccacttcaaatcgtggtacttatgctgaatacgttgccgttgatgacaacttaatcgcaccaaaaccagccaatgtcacttttgaagaagcggctgccgtcccattagctggcgaaactgcttggcaagcactctttaaccacggtcacctacaaccaggcgaaaccgtcctggtccaagctggttcaggtggcgtagggtcatatgccatccaattcgcaaaagcaatgggcgcccacgttatcaccacaactagtgcgaagaacttcgatcttgtccgtgaacttggcgctgatgaaatcattgactatcgaactgaaaaagtggccgataaagcccacaatgtcgatctcgttatcgacactatcgggggtcaaggacaagtcgatgcatgggctgtcctcaatcctgaaacaggtcgccaaatttcaatcgttggtgaagcgcctgaaactgcggccatcattaaagataccaatatgactttcaaagccatctggttaatgccagatggtgatcaacttaaaaagattgccgcattaatggccgatggtaaagtcaaatcaattatcgatactgtcttcccattttctgctgatggcttgatcaaagcccatcaactaagtgctacgaatcactcaaccgggaaagttgttattaaattctagatctcccaaaaaacaccgctaacctaataggctagcggtgtttttttaatcattgaataattgatcactttctttgtcggtacgattcccaatcgtataaatttcgaccattacgaaaattaattcgatgggtggaaagaaataaatagcgactaatagaatcacttgaatcacccagaaataaggtctagtaatcgtgctatagatcggcatggctttaattttttgataccgctcaggggcgacttcacgattggcgttcgccaatgcatcactcaagaagaagtaggccaataaccaaatcagatgaaccacgtagtaaaaatattccggaccgcgttcattgatgaaccgccccgtccaagccgttgcaacgggtaaaaatgacatggataataaccaaatattattcagccaataaatacgctttgttcctcgtttcgtcagcgaaaacatatagtaatgattataccaagcaacccctacgaaaacgtacgtaatgatatacgcaaaaaagtagggaccattttccaaaagtgccttaatttccggtgtttctggcgttttaaattccaagatcataatggtgacaataatcgcgatgacagcatcgctaaatgcttctaatcgacccttattcattctatacatccccttaacaaaaatagttaattttatattttacactatttaattatgatgtgctattatttatagaatacctgatgtaccagtgcattcaacaactaatccccaacaatcctttcaaagatacttaaaaataaattgatttcagccattaattaatagtataatttatctacgtagtaagggaggaattatcatggaaagagagtatcaatcacgcgcttcacttaaaaaagaagttaagtcattatttgctggtcattggggaaaggccgttacgttgaacatcatccccactctgctatcaattattggggtgattattgtcggagcagtcttgatggtcatgattgccatcttcgcaaacaccgacccatcaatggctgccaatgaatctttttcgggccattcgtctggtagtagttttgctggtcaaattccaagtttcattttggggctcattacacttgggattaattttactttcttagattggctccgttcgaaagatgctgattttagttcactcaaaggagctttcagtgtcttctcaaaacgttatttcttgggcgcttttctaattcgaattttagctagcttatttacattcctttgggcattgttattcattattccggggatcattaaaggctacgcttattctcaagcttcttatatcttcaaggacttaacagataacgatccacaagctgacgttagctttttagattgtatcactaagagtcgtgagttaatgaatgggcataaattccggtttttcgtcttacaactaagcttcttaggttgggatattttagctggcctctcacttggcattggctatttctggttaacgccatataagaatgcaacttatatggcattctacaaagatcttgcaggcgatcaatttttacagacaacttctgcagatgaaccaactgaagaagttactgttgaagcaatttaaatgaactcaagacgttcttaattgggcgtctttttttgtattatgcggtgattagcagtaggcttagactaaccattttattcagaaaggatgacgtcatcatgaccactaatcaccaaatccaacttgataccgaacataattggcacgcagtgtctggtgaaatccctacgcctaaacctgaagagctactgatcaaagtcagggcaagtagcgtcaaccctgtcgaccttaaaagacgagctagcaccacaaccattttaggctatgacgggtatggtaccgtgcaagcggtcggcgccactgtgaccaactttcaacctggcgatgttgtcttctatgccggcagtacccagatcgatggcagtttccaacactatcaatgtgttccggccgcgatttgtgcgcttgcgcctagtacaatcagtgccgcggagattgccggcttaccgcttgtttcgttaaccgcctatgaattactttttgaaaagcttggttttaccgctgaacaaaatgccaatcgtggcaaacaactattgattatcaatggtgccggtggggttggatcaattctcagtcaactcgccaagtgggccggattcaccgtcactgccacaagcagtctcactcatttcgactggctaaaaacaaacggagttgatcacccgctggattatcattcacctagcagcttagacaacttagccagtcttccggataacacctttgatgccatcgcggtcctttatgatattgaaagctatctccaagaggtcgcacggctgattaaaccgtttggacaagtcggtacgattgttggcaatacgcatccacttgatctcgcaccgcttaagcctaaatcagcctcattttcatttgagtacatgttcactaaaacggactatcaattccaaaccactagtcaaggggcgattctccaacaaattgcgcggctaatcgatgcgcggattctgcatccaatcaccaccgcccactacacaggcttaacggtcgctaatctccaaatgattactgataaactgttaactggccatactactggtaaacagggattggtctactaaacgcaaaaaagccgcaaccaaattggttgcggcttttttaacacaacagtcatcgagttgcggggattgaacccacatcaatcattcattttacgcttcgcttttaatagccaatcgcttttgattttcttgggaggaatttcaatttagatgattggttctaccgttaaactataactcattgggtgttgctaagacacttctttagggaggaattgtctcataaaattaacttgctcagattcacttacttgggagatgcttatctgatatttatagaataccaagcagttgggaccaaattgtgaactttcaagtatgaaatgatgtccgttaaaaaaagccccaccactttggtgagggctcaattttatagctcatcttccgtcgccaacaaaccatacttcactttaaagcgactgatgattcggtaccacgactgataaaagaagaaaataaaaaaaacatttgataaagcatgggccaagtcaaaatagaaactcgcgacataggctgcaataaaagtcttaatcgtcagtggattgacgtatgcgacaaaataccacagattcataatccacccaaaaataaagccccagacaaacccaaaaatacagagcaagtatttattctgtgcccactgatggcgactaattaagcctgccgtaacgcccatcatgccccagcaaaacatttgccatggggtccatggcccttgtcccaaaaacatattcgagacaatcgcggcggtcgaaccgacaataaaacccgattctggaccaaggactaatgccgacacgataatcacaaaactagttggctgaacactgggcaatggtgcaaatggtacccgagtgactgccgcaatcgccgctaaaaccgcgatgaaaataatttcacgggcgcgaatatcccgggtttcaaaccgccaataaaatggcagcatactggcaatcaaacagataaaactgaagatcagaaaatgctgtccttttaaagtgacgataaacaacatgaaaatcgccataatcaagaaagccaatccaaacgtggtccaactattttttaaagctttcatgcgtgcacctcttcccaattcagggcttcgggcaattgactgcgtaacattcggttgatggttgtcgtatagaagaagttatgcgcgaaaaaggcataaggttcttcctccgatacaatcgtcccatcgaataataaggcacactgactagcaaaccgggcactaaaggccatatcgtgacttgccataatcaatgttaagccttccgcttgtaaacgcgttaacaattcacccaacgcccgtttgcgaatcggatcaaggccctttgttggctcatccaacaagagtaactgcggctgcgctagcaatacaatcccgagtgcaatcaattgttgctcgccgccactggcatcttgcgggttacgttcagcaagggtttgaagaccgagctttgctagcatctcttctgccacttgttctggtgttgcgcgttttaactgccgcgcccgttcgataaattcttgacggacactatcataactgaaatgatcgctcggtgtttgtgagagataacccactgttttgaaaagttcagcttgcgcccacttaccgatcttcttcccctgtaacttgattgcaccatggcgcggttgtaataaaccaatcaaaagcttcaacaacgtcgatttaccagtcccatttttaccaacaatcgctaaccaatcgccggtatgaacctctagattgagctggtctaaaacataagggtcatttttttcatactgaaaactcacatgtttggcctgcagcattgttgcttggtcgttcgtggctatttcacgtttagtatgtgttaactgccattgtcgccgctcaatcaattgcttgccactgacaacggtcaatggtaatgccgcaatatcagctggtgcaatcaactcattttgtaaaaagacgtgtggcacatctgggacgaattcacgcaatgccggttgcgcccaaattgctgctaatccaccagcaaccggtccttgatacgttatctcaccgccatccatcaaccaaagttgattagagagcggtaaaatatcatccaactggtgttcactgataatcacggtgatgccgagttcgtcatgtacccgttgcaataaactaataaattctttggtcgcaatgggatcgagttgcgctgttggttcatccaacagtaaaagatccggctgtaaaatcaaaaccgacgctaggttgaccagttgtttttggccacccgataaatcatgcacggaagcatacagcaaatcttggaaacctaaaaagctgactaattcggcaattcgtttttgaatattcgcactcttttcaccaatattctcgagtgaaaaagcgagttcctgaatgaccgtatccatcactaattggttatccggattttgaaagaccatcccaatcttctgcgcacttaacccttgcgataaatcagctaacggttggccctcgaaaataatctcacccgaccgtttaccaacgggccagagttcttttttgagttggcgcaataaggtggtcttcccgctacccgagttcccagctaacgtaatgaagtcacccgtctgaacggttaaattgatgtctttcagattttgttgggttgctaatgcgtactgaaaattaaattgttttatttgcgcaatgtccaccataaatattcccatccttctagtaatagcggcaaactatcaattaataagactaacaccaaacatagccaaccaatttgattcaaatgaatcgagccaagtattggataaatcgctaagcggccaatcccctgtttagcaaaataaaaacaaagtgcactgcctgctacaagacttgccaatacccaaccatcccgttgggtaaatcgataacgttgataactcgttcgcttctgtgacccataaccacgggccgtcattgaatcagccgtttgtagtgcgtcaaccaatgaattaatcaataatacttccatcaaacgcatcccggcatgtgatcgggctctaacactccccgtttccatctgcacaccacgtgttctttggacattcttgatattggtaaaccgccgaataaatagtgggacaaaccgcatggtaatcatcgttaataaagttagttgcggtgaaagccgcacaaataaatataagaacttatgattcgtcatactctgattataggaaacaaacactagcattaagatcgccagcgaaagcgccattaaaaaaccatacgtgacagcctctgctgtgatcaccgtcccaccaaacgtcgcaatcacgtgcgccccatgattattcataatagggttcatcacgacgataaagagcatcatgaacaatgcaccctgcaatgtccccagtgttttcttctggtttttcgcaagcaagttcactgcaatcatcatcaacaattcacttacaagaaaaatcggatgaataaaaaccattgagaacgcaattgcaatcacgtaatacgcaaagatgacgattggatttaattgatcaaagaccagttgcgattttaaccctgaggcgcgttgcgatcgtgcccgagatcttccgtatacatccaatcaatcacatctccactcttaacaggataattaccacaagaatagttaggaaaactgccattcactcgataaagccatccgcttaacggtcctttatcaaattcgaatagcccattaatgcctttgatatagacgccgccgcccgtcccacgataggatagtgccatcccgcgactttgcaaatcacgttttaaaacatcaatcaccatatccccatccttgatttcaacttgatcaccgttcaaccatttcggattaccttcactaattggtccataaacattgacgctcaccttttcaaggactggttggggcgtcgtagtgggcggtgtaactggtttactttcagttgattgtgacgattgattaatggcggattgggtcgatgccgattggactgccgagccttgttctacagcttgttgcgatgctaattgtttgctagaggccgatttttgtgatgattcatttgtctgttcagattgactgctggacttgcgcgtttcagctgttttccgactttcagataccgccctactatgtgactcagaggccttagatttaactttaccatctaaaccaacagttgctggcttgacccgtttttttgatctatgttcctctttaacatgttgactacgcgtagacggattatcttgagccacactttgataggtaccgtatccgatgccgcttaaaataactaaactaccgataatcgcaatgattctctttttagacatatctaactcctaacgatgttcaacttgacgcttgaaccaaatgccaataatcccagtcaaaagtatcaagccggctacagaagcaactactgttgagttaacacccgtttgtggtaattgcttttgctttatttgagcatgatcttgattgtctgcttggtgtttattttctttttcaaccgtagtcacttgtcgttcaaacttgaaactgattgtattattcgctgcattaatcgtgatggatttggttggcgtgtcttttaattgataaccctcaactgcaacatcagatgcattaatcaacattgtgcgtccaactctttgatgctgcaattgaattgttttaaacactttgccgttttgatcgactgcttgcaccgtaacgtcagcaaactgcgctgcaggaattgtcccaatcatttgtttccgatactggaacgtcacggtcgttcccgttttagcaacttgaacagtttgttgtgcattgcctaataattcataaccctcaactgcgacttgattagcattcaccgtaatggtttgaccaacgggttgttcagctaattgaagactctttaaaatttgtcccttttcatcaactgcttggacctttaccgatgctttttcaataactggcgttttaaaatcataaattgagccttttcccgcttggaacaaccggtattgggctaacgtataaacggcttgttcagttgacatcgctagcgatcccatatcgttattaatattccagcggaactgtccatctgctctttgataagcgaccagccgtgaaatcgggttagcgccttgatcgccaacaaatgttgtgactggatcaactccagctgcaattaagcccatgacaaccattgccgtactatttgagttttcttctgtcatataaacattagggattaaaaaaccacccgtttgtgcaacaaatgttttttctttcaacatcgttaccgctttatctagcgcatcttgaacgcctgggaagtcacgatgcatccccaacgccgtcatcgtcatcccggtcgtatctaaatcacttttactaccgaaaaaagcccagccattttcagcgttttgtgcttgtaaaaccgttggaattaaactatcaatcgcttgctgtgccttggcaccataatcacgcatgctaagggcgatgatgccgtaaacttgcccgttgatcccaccagttggtgctttttcaataattttatcaattatatttaaaccagcgaagttggttgcatcttcaccaagtgctgttaccccaattaccaacacttctaaatcggttgccgaaaaacgttgatcagcgagcattgattgtgcatccgcaaccaaggcattatgataactcaagcgttgcgctgcactcagtgtcacgcctgattgaatagctgctaacgctgaccatgcatctggttggccattattcaacaactgttgcgccccagccaccattgctttttgataatccgtactagatgcagtacgtggtgtcacttgtgtaacctttgtctcactcgcagacaccgtttgtgcactaccaataactgaaacaacaggcattattaacattaatcctgtccataataaggtaaaaaattgttgtcgcttcttcatttaactctcctcattccgattaactttgataccctataatttaccatatttaggagctagaaagttggccctataaggttaatcttcacaaatacgccttaaaaaaaacttcatttcaaacacaatttattcatatttcccgcctaaactaatatttattcagttttaaggaggaaatacttatgaattttatcaagcgtgcttggcaaaacgtcatctttaaaaaagggcgtagcttcttattaataattgtgatgaccgtcatcatgatttttatcatggctggtctattgattagaaatgcagccattacaaccgtcaacaataccaaacaacaggtgggcgctagcgtcaccctttctgcaaatcgcgatcaagcgtttaagaaaatgcgcgcctcggctagcagtgatgccccaagtactacagcaacgcgccctaaattaaccatgccctccgtcaaattaaaagacgtaacggctatttcgaaattatccgggctggcaaattataacgtcagcgtcacgacttctgcgaacgcctcgtccattgaagccattacgacatcaagtagttcaaataatagtggtggcatgatggacggcggccctggcggcaacgctgagtcatccacttcaacaggtgacttacaaatcaccggagtgctcaataccgcaaccctcagcgactttaaagataatacaagtaaaatcacgaaaggtcgcgctttaaatagtagcgacaaaaacactaataatgtcgtcatcgaatccgaattggctaaagaaaacagcctcaaagtcggcgacaccattaaagtcaaagccagcacgacaggcaaaaaagcctatacgctaaaagtagtcgggatctataaggctagtcaaagtagcgctggcatgggtccacaacaaacagaccccgcaaacgtcatctatacggcatacacattagctaaccaaattaaaggtcaaactggcaaagtggatagtgccacattcacgcttagtgacccaactaagaaaaatagttttgtaaaagcagcgaagaagattatcaatacgaagaaattcacggtaacagctgatgacagtacttaccaatcactcaaacaatccatgcagaaaatggccagttttgctaataagattgtttggttagtcgctatcgctggcactgttatcctcgcattaattattatcttaatggttcgcgaacggcgttatgaaatgggcgttttactctcattaggtgaaaagcgcgtcaaaatcgtgggccaattattagttgaaatgttcatgctgctgattgtcagtttagctttagccggcattggcggacgattcgctggtcaagcgcttagcaaacaagttatgcgttccgtcacaaccgaaacgacaaccagctcacaaacaaataacatgcaacctggcggtaacggcggccctggtggcggtcaagcccctagtggccaaactggtggcaatcggccaagtggtcaaatgccacaacctggccaatctgctaaaaaagccgtcaaagcaagcgaccttgatctgaagattagtgccgtcaccttaatgcaacttggcgcattcggcttcaccatcatcgcatttgccgtcttactcgcatcactcaatattttacgactcgagccacgcaaaattctcattggataattataggaggtccactatgttaacagctaaaaacatcagttactggtacgatactgaagaaaatacactttacaaagatgttaatctcgattttgaagccggcaaactttacggcatcatcggtagcagtggtgctggaaaaacgaccttactcaccatgctttcagggttagataaaccgcgccgcgggagtattttatacgaaggtaccgatatccaaaaaatcggcttaacccaataccgcaatcgctatgtgtccatcgtgttccaagcctacaacttactcccctacatgtcggcactcgacaacgtcttgactgcgatggccattactcattcgacgcatgaaagtgccgccgatttcgcactcgaaatgctcagcaaggttggcatcaatcccgaactcgcccataagaacgtacaaaaactatcaggtggccagcaacaacgcgttgcgatcgtgcgcgctatgtgctgttcagcccccatcgttgttgccgacgaaccaaccggtaacttagatgaacaaaatacgcaggagatcattcatctcttccaagaattagcccatcaacaacaaaaatgtgtgattcttgtcacccatgaaaaagaagtcgcagcaagttgtgatgttcagtatcatcttcaaaataaaacctttcaaccagttgcttaactaagtaaaaaacgactgagcctgtttacggcttggtcgttttttaacgggcatgctatactgagggcaatcaaaaggagggcttctaaatgctaacaatcttctatggttcttttagccatgctggccaatcatttattattgcagcaacccccaaaggtatctgttttgttggttcacccgatggcactatcagtgaattaaccacttttcttccccaaacgaaattagttgcaaatcaagccgcaatcgctccttatagtgaatcattaacagcttatctcgatggtgaccaaaccacgtggtcactgccaattgatattatcggcggcacaccttttcaaagaagtgtttggaccgccctgcaagctgtgccatatggtcaaaccacaacttacagcgctttggcggctcaagtcgggcaccccaccgcaattcgcgcagtggcttctgccattggtcgcaatccactattgatgattattccttgccatcgcgtctaccgtgaagacgggcaaattggggggtatcgtggcggacttgaattgaaacaaaccctccaccagcttgaaactcaaaccaaataaggggattaatttgaaattttgccaataaaagtctatacttattattaagtcggtggtagaatgtacggttactctactcctttcaaattaagaaaaagagatgattattacgcaagtaactgatgtttatgggttaacccacgaaaactgcaagctgatcgaaactgaaaatgattttactcgcatcttcctagctgaaggtcctgatggtacacgttatacgtgtttactacctgatgcgaaacccaatccaaagtcaaaccaacactttgaatatggtaatccagcagatgcaccatactagatactaaaaaagcgccaacggatattagaatccgttgacgcttttttgttgaaacgtgttctcgccagcatatttctgcacttaaccaaatttaccaaatcagcgattacatcgccaatttggtaaatccagtcaatgctcagcactctattctgccattaatatatccaagaattgttcgccgtatttttctagtttattttcgccgacccctttgacatctagcatttcagtcaaggaagttggcatgatttcacacattgaatatagggtcttatccgagaaaatcacaaacggaggcacaccttgttcttccgctaaatcgcggcgtaactcacgtagttgttcaaataattcattatcttcaggcaacgttttttgcactttgaccgccatcttgcgcgtcactttcgcttggccttttaagactgcaactcccgccgccgtgatttgcagcactgggtattgaccgccagaagcttgcaaatatcctgaagcgactaagtaatcgatcaaaccactgatttctttttgcgaatcaccacgcattagaccatacgttgggagttcatcaaagcggaattgcatgattttttgattcttcgagcccgtcaatacttgcgccaccaacactttgccaaaccgttcatccatccgtttaacgcacgataagactttttgtacatcaatcgtgatgtcttgttcttcacgcgtatccagacagttactgcaccggccgcacgcttcacaatcatcatcaaaataattgacgatgtactgttgcaaacattgctgcgtattggcgtactgcgtcatttcttgcaacttggcatattcttgttgcttatgcgcttcgtccatttccgactgatcgataaagaaatgctgaatctgcacatcattcactttaaataatagaatcgcttcactcggcaagccatcacgcccggcccggccagcttcttgatagtaagcctctaaactcccaggaatctgggcatgcacgacaaagcgcacattacttttatcaatgcccatgccaaacgcattagtcgcgaccattatcggtttgcgatcatagagaaaatcctcttgattctgacgacgcaccgtttcgtttaatccgccatgatacattgtcacatctaacttagccttttcaatcagcttcgtgagccgttcaacttctttccgtgtgctggcgtaaataatcccggatttttgtttgttgacctttaaataatcgattaagtagcgatcactattttgatttttaactacttgaaacgcaagattctgccgtgaaaaccccgtcttaacttcgtgctgaatgttcaaccgttgcatgatgtcagctgccacttgtgaggttgccgtagcggttaaagccacaatcgttggtcgttggcgcatactctgaatcgtatccgtcaggcgtagataacttggccgaaaatcgtggccccattgcgaaatacaatgcgcttcatcgaccgcaatcaaatcaatcgttaattcagctaaatcagctaaaaagtaatccgaatccaagcgttccggcgaaacatatagtaatttcacttcaccacgcgcagcttggttaaagcgttcttggacttccccctgcgttagcgtactattgataaacgtggctggaatcccattttcattaagcgcatcgacttgatccttcatcaaagaaatcaacggtgataccaccaacgttaaaccgggtagcatcaatgctggtatttgataacacaatgacttcccgccaccagttggcataatcgccaagacattagtgcctgccaacaatgattcgatcacatctgcttgaccttctctaaagtgatcataaccaaatttttcttttagtaccgcttgtgcttgcatgccatttctcccacccgttaaaattcctaccttctatcataacaaagattcgttaattccggttaattgaatctcagtttcaagcattccttcaatcaattcttactggctgacaaaaccagcgatttagtgtttaattagaagcatcaaagactgtcaggaggcttcctatgaccttggaaattaatgcaacattaacggctacccaaacgatcgtcgatttaatcgaacaacccgttactcagcttttaattgaacaaacaccggctaatacaaccgcattcgcacaccccgctttattcctcggttttgcgcagcaacaactgcaacaaattgaacaactctccccacttgaaacagcctcgactgatcaagttgacacgggtatctggattaccatggatcctgagtggactgaacaaattggctacgtagggcagctattagccgaacaaaatcaaccaccgataacgagcacctcgcttccgtccaacgtctctcaaaatttccgaacaaccttagctccagccgttgaagccatcatcttggtcctcagccgctttggttatcccctgaccaaaagcgcaccagtcaaagcaaaaccggctaaaacacgtcatcgatggacaaaagccgtcagccaaatcgaattcactgttgctacgcgcgaagcacaaggaacagccatctggcaaaagcgcaaagagatgttattgaaagcgggggcacaattgtggccaaccgcgccacttaataaggatggctcgtttggctttgctgctaaaatgggcactcacttgcgcaacgaacatgcagcgcaaattcaagacaatcaaacgactgaagacattattttcaagagcgtgaatgaaatcggcctcttcttgtactttggtggcaccaatagttggctcgaactatgcgacacaaatggtcgctcaattgacgactggactaaaatctaaaatagaaaagagattcaacatgcaaattatcagttctggcattcatcacggctacttcgacgacctctacggcggtcatggcactcaatttaacgcggaaggtgtgccaacttattccattccgtttaacattcaagacgcacctagcgatacagtcagttatgctgccgttttctacgatctagatgcctacgaagtgacgcaagggtttccttggattcactggacacttgccaatttaaaaacgaccactgtcgcggctaatgctagccaacaagcgcccgatttcatccaaggtgttaatacttggcacagtcccaaaacagaccatttatcaacagaagcaagtgcttgctacggcgggatgacaccccctaaccgcgatcacacttatacacttaaagtatttgcacttgataccacgctcgatttacagcctggcttttacctaaatcaaatgacagcggcaatgcgcggtcacatcttagatagcgctattttagaagcacaataccgccaatttaaacattaggtgacaatggccttaactcggctaacacttttgtcatctgatcttaaaatcgtcgcttttttacgcttaacatcgtatgataactttatcaattcggaataagtctagtggtaataagtcaagaagataattgatataaatatcgtgtaattttacaaaattggcaacactaaactaagcctacttaaaattcacaaaaattttagtaggtattccaaagatttgcgtgaataactacgttattccttcaacacactctttggtggtgtgtaaagttggtgattgcgtagtagcgcatcaaccaaacgcacaaattttctggcggttaaaacaatagctcggcggtgcttatttatcggggtttcggtatatttctttttataaaaagctgtgtattcaggtaagtgattttttaccgagttggcggcttcaactaagtaataacgtaaataatgattaccttgttttgttagtggtgtgacttctgactgataatttccagattgtttaactttccaggatagaccggcatatttggcgacttttgcttgatcatcaaatcgttcgatttgaccgacttcagctaagatacctgcggcataaaccttaccgattcctggcacactggttaagcattgatattcaggaattatttcaactagtttttcgatacctttatcaatttgtttaatactttgctgtaatgaacgcatttgaactaccaaggtactgagaataatatcaatcgactcattcattaatcgcggcaactgatagctatttttaatggcacgctgaatggttttaaccagtttttcaggatttttaaagttactgcggccaacattttgaatcaattggacgaagtcctctagtggtaaattggctaattcatctaatgagtagttttcagtcattaaatgtacaattgtggcgctaaaaatgccggtagattctgattttaattccttactaagcgtattacatttataagttaagttttctaagaaatgttgtttaaccgttactaattcggtaactagttgatatctagtacgggttaaacgttgaagtgccatatatttttcttctttgataggtgacgttgtaaaacgttgaattcgtaagtagtcagcaattcgcatggcatcattggtatcagttttgtcttcatcgaagacacgagaatattgcttgattttaaatgggttttcaacagtgactaccgttggtagtgcatttaagtctgcatcttcttggaaaaacatagctggatgaaaactatatagtgatgttgattccataccaatcacaatctgttcaaatgatacttctgcgtgatgttttaaaattaaggctttaatttcagaagcaccatttaaatcgttagcaacacttaaacgatttaggattgataagttactatcatcggtcataaaacaagcatcaatcttttcagaactaatatctaaaccaacaaataatttcacaggaaggacctcctttcgagagttatttggaacttgctttgatactgcgggattccccagaaaatctttacacagctacaacctcgcgtaacagaattttgaccaattggacttatgccgccttcaaactactacattgaagataagcctgattgaaaacagctagtgagttgggagagagcgtaaagactcgggtaacggacttactaaagtagagttaactacaggagtttttagcaaattcccgatagatccattccatggtcctattatattctgaagaatcccgcagtatcaaagtaataattaaattttattgtaagccaacggcttataaatatatcttacgaggagttctcattcaatgaaaaaaaacaattagcattattgcgataatcgccctcatcatcgtcggatttgctggctaccgttaatacaaaaatacgtatgtcggcgaagtaggctacgccaaagttgctgctcaatctccagctaaagaagccaccaaagatgattcaggtaaaacagtgactaatatgtatagctatcactaccaactaaatgtggtgaaagaagatggtagccaccaagtggtccctgtcgaagttactggcgaaaatccaacgccactcactcccaacagctatgtcaaagttgaatttaattcaaaacgcgtcttaaaagggcctaatactgtgtccaagaatcaaattccggctaaagttctggcgggtttagataaataataaattagcttatcctagtaccattaatacttgttattagctgttaccctcttaaattaagttattaaaaagcagtacccttgattagttatcatgggtgctgctttttgtatgtttcctgtgaaacattttgttttgtttgattttctttaaggcttcacgttgggcgaagattgttagttcgtgttcttcaacaaacgtcatcacccactcaggattttccttactatagttacgtaaagcccagccaattgctttttggataaagaactcatctgtgtcaatatctgccagaatggcttcttccaaaaacgccacattcgttttttcgtaaaaactgagttgtagcgtaatcgcaatccggcgcagccagaaattctcagcacctataaaatgctgtgcaacccaatcaaactgttcaggatgcagtctgatgtactctccaaatacttttcgccaagcatcgatgctgtcccaccaaactttttccaacaccaacgttaataaatgttccatatcagccggttcccaccaacgtactgaacgcaatgccatctcgatggcaacatattgatactcacgcgttggttgagcatataaagtctcaatgaactgcattatttctgctggtgacaattgtttcacagactgccacaattcgcgttcaattaaatggcggtccggtgctttaacaccgttaaattcaaattgactctgcatgtatttcttcattgctgcctgattttctggatatatcggtaattcaaaatccatggttatccctccactatatcgcctctaaaaaacttgtgccgtttgtttagctgtttcaatagcttcctgcatgatcacgttagctttttctggcgaatgatcaattccttcaatattaattttaatgacttcgtcaacaccggcaaagccaaggattgttttaatgtattgtgttgcaaaatcttggccagcataaacgcttccggctgactgaatatgaactgctttttttccagttactaagggctgcggagctgtttcagtatgtctaaatgtttttccagccaccatcactgtgtcaatccacgctttaagtttcgtcggtacatttaaattccaaagcggattaacaatcacaaacttatcggttgctaagaactggtcggtatagcgattaaaccgagcgaccttctcttgctgactagcgcttaaggtggccatagcttgcccttcttttaacgccgcccatgccgtcattagttcttgatcaatttctggtaagtcagattggtacaagtccaaccaactgatttcatcagctggattttgtttttgataaacttgcatgaactgcgccaaaatcgttaacgtccgtgactgttctgtagcaagtggatgcgccttaacaactaatactttactcattaatttccgccccttagtatttaaactttatacactatcgttttagtatactatctgcggcgttgtccataagctttacatcatttaataaaccaaccacctattaatgaccttttacaacgttttatacagcaacaaacaaccaaaaacgattaataagtcataaatataccgcaccatcgttcgactatcaattcgagtgctcacccaattgcccaacggaatcacaactaacaataatggtaagctaagtcccaatagttgcaatacttggatggtccaaaagcccgctaaaatatgactgattacaacgattgtcccaacacaaataaaatgggcctgtagaatgcccttaacgatgctactggccatttttttaatgtcccataaatcaccaccggcacaccatgactattgtaggcactgcccatcatgcctgatattatcccagctaaataatcccaatgatgtgactgtaaatgttgctgctgcacgtgatgtcggtgtaactgatagcgattatagctgccataaaggattaaaaacccagctaacgttctcaacacaatcgtcgttggcacatacgtcatcagcgctatcccgactggcacacccaataatgaaccaatcactagtcgtctgacaaccgctatatcaatctgttggcggtggcgaatcacagccggaatcgccacaattagtcccagcacgccaatcaaagccgttgccgcttttaaatcaatcgctattagggccaataatggcatcgttactaatgcctcgccaaacccaaaaaccgttctggtaaaagcgcccaacgcaacgatcaaaagaatcataattatcgtcatccaaaaatccttcctaaaccgttttgttccacacaaccttttcaaactgcgtgccattactttttagtacggataaacttgcattagcaaccattttttgtgatcgaatttcctcaaacggaatccctagtagtgtgttgataacaaacaataaaataatcccatgcgcaacaactaatacatcaccatcaggatacgtcgtttgagcagtcttaatcgcgagcatcccacgttctaagaccgcctggtaggactccgcgtgaatctgtttggcatcaaacagctctggatgatggaagtaattttcatattgtggatggttcgtcaaactagcaccaggttggccttcccaatcaccaagtgccatttcttttaaatcatccacgaccatgattgccggttgtgattgattagtctgcgacactatcgcatccattgtttcaacggcacgtgttaatggtgacgtcagtaacgcatcaaaagactggtccgctaataaactacctagtcgtttagcagccgcttgccccgcctcagttaatgttgaattcgtcccaccaccattgaaacactgtactcgattaaccatcgtttcaccatgccgtacaaaataaaaagttgtcatgttgatcccacctttataggatctatcatactataaaatgcaaaaaaagacgcagttcaaattgaactgcgccttcattgagcctcgttttattcaccttccggcgtgttttctgccacgacttggtcataggcctttgtaccagcatagacttcgtcagttaggatgttgcgtttatacttcatgacacgataaatgtggagaattaagactgccacattaatgaccagtgctaaaccactgattgtcatcaaagcagcactactgtgcgtaccttgcactgaaaattgtgaatccgttacaaaagcgggataactcattgtaaacatcatccaaaaagccaatgtttgcgcacgtgcttggagccagctcccttttttaaccaggaatgctgctaatgtacatgaaattaataatgcagcgcccgcatagaatgagtgatcaccaacacaattgtaaacataggcgaagttccaaacatcataggcgataatccaaggccagatttgatcgggccagatcatgtctttttgtttgtcatgactgataataatgccaaaccagcctgagattgtgatgatgttaataatcccggcagccccattcatgatgttccacgcgccaccattcatgatcacgccgtcgactaagccatgtaggtgtgaaacttgaaaatcacgaatcacagcttccataatattaaacgctaaaattgcgggtgggaaaatcaatgcccacttgttatgttgtaacttagggataaagcgcagcgccataaaccctaaacaacctgctaatgctgagtacactttaacccagtggaaacaagtcccggtactgctaccaggaccagccgtcgttggccaaacaaagagcgttaaaacgactggcaacccaacaaagagaattaatccaatccacttgttagcccgagctgcttcatttaaaaccattaatgcaataaccactagtccccaaactagccaatccattcctgaaatattttgaaataaaaacatatcagtcacctccaaagaaataattgctaattacattcttactttaactgcaagctggcggtttctgtatggtcaattcagggtaaatgtccaaatctaatgattattttgtaaaacatggttcacagtaccatttaacatgcgatgcatgcgctgataaaattcctctttagattcttgtagatttgttacaagccattgcgtaatctgtgtcgccaatgcccaaccataaaattggcaatttcatctcggaaagtcgctggacaatccacctttaaatcttgaacaacccctgcaaccatgttaaaagcaactcgatacaaaaagcgacttagtaaatctcgattaagtgaatgaaacgtatttaaacagaaatgccgattattttcaatataagttaccaagacatctagaccgacgccccaatcccgttcacgttgatacactgccagttgcgtaacaatttcacgattataaatccaagcaaccaactcattaatatcggcgaaatggtaataaaacgtattgcgcgcaacgtcagcactgcttgtcaattgattgaccgtaatgtgatcgaccggagttgttttcatcaattcttttaaggtatctgctagcttttgcttggtatccatcgtattgccctccaaaaattatctatgattagcatcccatagatagttccgaactgcaatcactaacccgatttgcactccaggataaattgttctatcgttagagagtacaattaacggaggcgacttataatatgcacgaaactgacgacgcttttagggcgatgaccaatggggaatggtactttgattcagcggtcactattcaaaaacgggatgcagcccgccttgccttacaaaaggccagccaaatcttagataacgatgcacggatggccactatccaaaaattactcggtcataccggtagcgattttttcatcgaaaccggttttgaatttagcttcggtgaaaacattacgattggcgatcatttttacgccaatcgtaacgtcgttatttgtgacgaagcaccagtcaccattggtgactactgtaaatttggcccaggagtatcactcttaaccccttaccacccaattgaccccttagaacgtgcgacaaaaaaagaaatttctagtcccattactatcggcaatcacgtctggctcggtgcaaatgtcacaattctaccaggaatcacgctcggcaataacgttgtcgttggtgccggcagtgtcgtgaccaaatcctatccgggtaacgtaattttagttggtaatccagcacgggtattacgtaaaattcccgctaaataatcaaaaaggactgacaaatgtcagtccttttttaggcttcaattgcataatattcaataatcgtttgtaaagcctccgctgcgcgttgatctccaattaacttagtgtagtatgctgtaaatcgttcatctgctacatacatggctgctgagccgcggtgcattgctagactataccggggtgtcgccgtttgtaaccacgtttgatgggcttcaaaggctgtttgcgccgcttctgatggcaattgcggctggtccaagtaagtttgtaatgccgtcttcaatcggtcttcagccgcctgcatcgttgcatattgggcctcacttagccctaaaaagtgctgatcggcttcttgcttggcttgtttcccatagttagtcgtcacttcttgcccgtagcgttgctcattttcagccactgcctgttgtttaaactgtttgaatttagtttgatctgtcatttgaattcctccggtttgattttgaagggtcgcatctagctgtgctaacgttgccgttagcgcagcttgttgtttaaccagttgttcccgctgatttgctaagcgttccagacgctcggccggtggtaacgccaacagctgctgaatctcagccagactaaactgtagttgacggtacattaagattaactgcagtcgatctgcatcctggctcgaatacgttcgataaccattactagcaaccgttggccccagtaaaccgcgctcgtgataataacgtagcgtacgctcagaaaccccggtcaattcagcgaaagttttaatctgataatccatttgccttccctccttcaaaacccactataaggcctgacgtgacgtgaaggtcaagcattgttcgttagtgcctgattaatttctgtttaaccaagtaatcgtgggccacatcgcgtgctttgcggtgtttgacctgtacttggtagttcatctcttgcatttggctttcagtaatctgacctgccaagcgattcaatgctttgacgacttccggatgcgctttggcaaagccggctttcataatcggtgccccttgataaggcgggaagaagtgacgatcatcttctaaaacaactagtttgtaccgtgcgacttccgcatcggttgtataaccatcgaccacatcgaccttgccgtccgcaatcgctttatagcgaatacttggctccataattttagcatttaaatttaattgataggtgtcctttaacccttgatacccatctttttggtgataaaaatcaggatcaaaaccggccgtaaatggttgattcaaagcggctaaatccgaaattgttttgacattatatttcttggcaaaggccgcagtaaccgccaagtcataaccgttttgatagcgcattggcagtaagtacgtcatattgaactgttcttgtagcgatttttttgcaagttgatacgttttagttggattctggtttgtcttagttggcgacttcaccaacgtttgtaaaaccgttcctgtgaattcaggataaatatcaatcttatcagccttcaaggcgttaaataagaatgtggtcccaccgaaattgggtttaatcgttactttgtagttagactggtcttctaaaattagatcacgatacatattcatcaagatttcgggttcactacccaatttcccagcaatcgtgatggtggtctgcggcgcttgaaaccgtgtcattccttcgatcacgccgaaaaggccaacaaaaatggctaaactgactgtgatttttttaaaggataatgtccctaaccagcgaattaatgcactgaccactaacgctaaaaccgctgaaagtgtcgctccaaccagtaatagtgcgttattatttgactgaatcccaacaagaataaacgtaccgaggccgcccgcaccaatcaaggccgccaaggtagctgtcccgataatcatcacgagtgcaatccgcaaacccgagataatcaacggcatcgcaagtggcagttcaatccgtagtagccgtttagcgcgcggcaacccgaaggctatttctgcctcttttaatgctggatcaattccgatcaaaccagtgtatgtattttgaaaaatcggcattaaggcataaagtactaacgtaatcacagccggaatcgtcccaattccgacaagcgggatcaataatcctaagagcgccaaagacggaattgtctgtaagacacttgtgacttgcagcattgcttcagctaatttctgatgagctgttaaaacaatcgccaacggaatcccgatagccgccgcaattaataacgccaataacgaaatctccaaatgttgcccaagtgcttgtagcaactcaccggattgggtcgttaaaatttgttcaatctgttgcatcatcgttatagcccccgtttcgcaatgagcgttgttaaatcggtcatcgtcaattgccgttgttcttgaccatcagtggcaactacgcccccatctggatggtctactaattgttgcgctaattcagctaatgttgcactggacgtaatcgttgtcggctgattattaacaacagttcctaaatcggccgccaataaatcttgaactgtcaacgttgcttgttggcgttcaatgtcaaaaaattcgcggacaaattcattttttggttgattaaaaatcgcttttgctgtcccgacttgctgaatactgccttggcgcattaccgcaatttcatcgcccaagcgcaacgcttctttcatatcgtgggtcacaaatacaattgtattatgcagctgcttttgtaaactcaaaacgagatcttgtaattgtgtacgggtcaccggatcaagcgcactaaagggttcatccatcaaaatcaccttaggactagttgctaacgcacgaataatcccaatccgctgctgctgtccccctgataattcgcttggataacggctagcatactgatccggatctaaatggaccatttccaaaagttcgcgtgcccgtttttgacgatcagctttggtccatttcaatacctctaattgaatggtaatattttcctcaattgtgagatgtggaaacaacgcaatgttttgtagaacgtaaccaatattgagccgtaacgtttggagatccatttgattgatgggttggccgtcaatcttaattgtgccactcgttggttcaattaaccgattaatcattttaaccgttgttgtctttccgctaccactcggtccgaccaaaacaaatagaccattgtctggaatggttaacgtcaagccatctaatgctaagctttgttcatattgcttagtgacaccttcaaattcaatcatgtgctactcctttttccggttaacgatttgttaacttattgtaccacttagcaatcagcccaccaattgacgtgcttaaacacccaatccaatttttttgattcgctttgtgactatgctaagatgaacccgaattgaaatctgaggaggtcttaatatgcaaacacactttgatacaatcattattggtggcggtcctggcggcttagcggcggcttacagtctcgctgaacaacagtccgtcttagtcgttgaaaatgatttatggggcggcacttgccccaaccgtggctgtgatcctaaaaaaatgctttattcagctgtcgaagcactcgacaatcaacaagcgctccaaacaaatggcttagtcggaactagcgctattaactggtctgaactgatggcctttaagcgatcttatacgcaacaaatcccaactggtaccctcaacggtctacaacatgccggcatccaaaccgtcacgggcaccgcccacttcagtgatactcaaaccttgcagattaatggtgacacttacactgccgaccatttcatcattgcgaccggtcaaacaccaacgctccctacaatcgagggtcacgatttactacaaaccagtaatgaatttttagacctcgatcgtttaccagaaaaggttgcctttattggtggcgggtatatcgccattgaactggcaaatattgcagttactgctggtgcagaagtccatattattcaacataacgagcgtattttacgcgacttccctgaagttttaacacataaactcgtcaccagtcttcaggaaaaaggcattcactttcattttgacactgacgtcacaacaattacgcaaaccagcaatcagctaactctcagtaatcaagctaattttaaactgacagtcgacgccgcttttgccgcaatgggccgcaaacccaatatcgaccaactggcattggaaaaagctggggtaacagcgaaccagcatggcattcaagtcaatgaccatttaatgagtagtaatccccgcgtcttcgccattggtgacgtcgtagatcgtgtccaacccaaattaacaccagttgctggttttgaaggccgctatgtcgccaaccaactactcgctaaaaagacagcacccattacttacccactcattccacatacggtatatgcaagcccacaaatatcacaagtaggcgtttctgttgcaactgcacaagctgctcctagtcaataccgcattaatcaacaaaccgtcacaaattggtataccttcaatcgtattcaagaatccgacgcaatggtcatcaccatttttgacaatcaaactaaccaactcgtcggtgctgcggcttacaccacaattgctgaagaactcattaattactttaccaacctgattaaacatcagacaaccgcaacggaactcaccgataccatctataactacccaagcccggcgagtgatttaaaatattattattaaaaaaagtgttgagggccaacttactcacgaccttcaacactttttttaattttcttttttcgccttcatctgtaaccagatattaaacgcgagcacaatcaccagtaggactgtcgcaatcagcatgatgttatgcaagccttggtacataatcgcgcgcatcgctggtaataagtgcgctggtaattcgtgaacgcgttggagattgcttaacttattcatcatcgccatcgtaatttgaccgtgcgattcggcaatgccgcgtgttaaggcatggtttaaaatcacaccgtaaatcgatgacatgaatgtttgactgagaattcgcaagagataggcaaacgacgtcgcaatggggacatcgcgttcttcggcatcttcttgaacgctgatttgtaggacgttaaaactcatcccgagcccgaaaccttcaaaggcccccatcaacagtaagaaccaaaacggtgcttggtcgcccatcatcaacatgccgctaaacgcaattaaaaacgcaactgttcccaatgtcacaacgcggtgtttacccaatttaggctgaattgcaggacccgccaatgagccaattaagttggtcaccgcacctggaatctgcgtcattccaccgagtagcgcacttaatccaagtagcccttgtgcccacattggaatatagatattaaacgcgataaatgcgccccataaaacaacaaataaaataaagtcggtcaccaattgcggatttttaaataagcggttcggtacaatcggatcaactgcccggtcttcaactctaaacaagacaactaataaagctaaaccagcaaataccaatcctaaaacgagtgctagcgaacccgtcccaatcatttgaatccccgtcaataaagtcaccaaactggtaatcataatcccagcacctaaataatcgacgtttccggtttgatgtgatttaagcgtttctttaaagaaataacgaacacaaacaattgatactagggcaattggtacattgatataaaagacccaatgccaactaaacgtatcgacaatccagccaccaattaggggacctacaattgaagccgcactataactcgcagtcgcataaccaatcacctgcgcgcgtttgcgtaaatttttgtataagtcggcatagataatgaatggtaaagtattcatcccgccagcaccgatgcccatcaccgttcgtgcaatcagaaagaagacgatattccccgaaaccgcctgaaaaatcgaaccaaccgcaaataataatgtcgccagctggtaagccccacgatttccaatccgttcgcctaatttactccataagggggtcgcaaccgccatccccaaaaggaaaaccgccacaatccagcccatatattgaatcccgtgtaaatcactgataatagcaggcaaagccgtgttgataattgtcccatcgagtcccgccattgtgttggataataataatgctaatgttaccaaaagtgtatttttcttactcacgattgcgtgctccatgtatttttcttttatatttattatagtataagttatttcgtttaacgagcttacttcagtataccaatcacttttaatatcataccttatcatatacattttcacacaaataaaaaagacgccctcctcaggacgtcctctaactttaatttaatgcgtcaaactgttcgactttttggcgagctttatcactccgccgcatccggataccatattccgttaaaccaatcacaacagcgactatcaagagaatcaataaactcttccaatcttgcttcaaaataagcaaatcgcccgcaaaggcgtagataaacgcgacaatcgttgaacccccaaagcacgccaggccctgtgctcggggggtgaggtgggtgtctccagccgccaagttgacaaaggccgtaggaatcatcggcactgcatagccaattaatacaccaagcgctggatgttgcatcttaattaatgcgcggtaaacacgcgaatccggctttttactgcgatgatttctgacacgggcaaataattggacttgcaacaagttcccgatcgtcaagccaatcgcattgaccacgaaaccaccccaatgacccaaacacgcgccaataatcaatgccaccgctgatgttggcgcacccggaattaaggtgaccccaatcattaacagaccaaacaccaagaaagcatacggccccagatgacgaatctcaagcacatattggcggtaattttgccattgatccaagaaagcaaaaacggcggtctggtgttgccatccaattagaagaatcactaatcctagtaaaatcacaccgcttgctagccaaagtcgtttccgttgtctcttcgtcatctgattcccctcatttctacttaacaaatagtcctagttcctctagtataaacaacctgcaaaggggacaacaagtttattttctattttgattcaattcgttcactaagcgcttattttgatagcgcgtgtagtaataaaaaataatcacgtgcattacgaatgttaataacgacgtccctaataaatacggtgaaacaacatcaaataacgttgtcgaatagagcctcaaagcgagtatttgaaacccaatattactaatagtactaatcaaaacattccacggcgcaccgaacgtcgaatagcgccataagtatgaataaatgacgccaaacacaatgccaatcaacacgcctaggctaactaatcgccaagcagccagcgcttcgccccgcgttagcgttgtgacaacagtgagccacataatcgccattaatgccacttgattaaagtctttgcggatttgcttcatcattttaaccactcctttatttgcttggcataataccgactaacaatatactgtcttccagattgcgtatagaccaccaatcgcgcatttgaacccaccgcaaaattggcaacttgctgcagatttaaaatcgttgtgttattaattctcagaaaaccgttctgcgaaaacggggctaattgttttaaattactagggtagtaatagctattgccatcgattgtcgccaccttcgccaaatatccaaaggccgtaaaactttcaattgccgttaatgatatgttttgtaatcgatctgttcgcgcatctcgcacctgaatcgattgatcaaaggttagcttcttaaaagcagattcaaccgttgcttgattctgtggttgactgtgaacgacaatcgtatcttgtgcacactttgaatcccaattaaatataattttcattaactcgcctcctctacaaacctaaagatagcagaagatctcgcttaattcgatgactatttgttttgttgcaatccgctctctcttgttgcatataaaaaagcctcattcaacaatgaggccttttatgcctatctctatttgtgatacggacttccttgattaatcataaacgcccggtaaatctgttctgtcaatactaagcgcatcaattggtggggtagtgtgagcttgccaaatgaaagtgcatcattggcgcgtttgttaaccgcatcgctagtcccgagtgacccgccgatgacaaatgtgatatctgatttaccataggtcgccaaatcttgaatttcctttgcgaattcttctgaggcacgttgtttgccttgaatcgccaggacaatcacatgttccttatctttaatcttgttgagaattcgttcgccttctttgtctttgacgttagtcatttcagcgtcacttaatgattcgggcgctttttcatccgcgacttcaatcatttcgaacttacagaacttactgagccgtttcgcatattccgcgatccccgcttttaaatacttttcctttaatttaccaactgtgattactttaatgttcataaatagcctcctactgttacttacattttaggggaaaacaatgcagaaaaaaagctattcacagtaattcaccggaaagtactgcttatccacaaaagttgtccacatatgcacaagtgttcgtcccaaatatggtatctcgaatttttcttgatactaaataaccgacacctaaattttttcgttaaatttaataaaaaagttatccacccttttttgattgttcgttctcaaattatccggttacaaatccttttatatcagcgttattctggtgttataataattttaaaaaagttatccaccgcctgttaatttttttgtggataactaaaaagaccttttaaccgtgttatacccacaatccacagacttatccacagacgctcggatttcttcccaggttactatccacattgacatttttaaaacttaacattcctgccactttagtctgaatttaaccaaaataaaaaagccgtcaacgctaagaatttaacgttggctttttaaaaatgatttattttatagttgcgtactaaaaaaatctgtaattatgttcatcagcgctggcttcaccagatggcgttcaccatttgctgttaaaaatgtcacgtttttggcataagtttgacctttaatctgctgttcaaaagctgctacttgttcatagggaattcgttcatctgctgtcccatgccagaataaaacaggccgttgagcaattgcctgcggctgttcagttaaatcgtaggccgttaaccaacttgtcaataaccctagatcgtcaggttgtgctaactgatgcgcacggatattttcacgaactaagcgcgcataggctagcggtgccggcgagcccatgatacaagccgccactttaatttctggatgcttggttaagagtgccgccgttgtcatcccacccatggaaacacccccgacgccgatgcggtcagcttgaattaaattaagttggtgccagtaatcaacaatcaaactgaattcggcaaggttggtttgaatactttgccaaaaagtccatgacggaatctctgaaacaggttgcagccgttcaccatgattcagtgcatccggtaataccacgcgcatcccagcttcagccagtttacgcgcttgcgttaaaaccaattcttttgctgaccgccagccatgatagtaaatcacgagtggtaatggctgatgacgttgttcgtcagcgaccacttccaaaaccggaatccctttaatctggcgttttaagactaataccattagtgaaccctcccccactatttcaagattactataacggaagttggcggggttgtcatcgaattagaatttttcgaaaaataaaaaagccaccagattgatttaatcgggtggcttaaatgtgctccaggcatattcctgcgcttaaccaaatttatcaaatcgacgatgacatcgtcaattcgccaaatccagttaatgctcaaatataaccgcctgcttgcacactctgatctgaaacgtgctttttgaaactgacctttccggttaacctaaaaatagcggttatggctaaaacccgccataatcgctatttttttgttaatcctcaaggtcaaaccgtttcaaaggcactctgtttttaaacatgctttttaaagctgactcttgtgctttgctacatatcgcaaacaatcgactgcgtcgcttattcacgatattaggcaaatgctcagagtcaaaccgctttaaacgcactctacattgcttttggtgcttgtacgcctaataagtctagtgaggcttctaggactgtgctgacactcttcactaatgaaagacgcgcatttttttgatcgtcgtctgccaaaatttttgagtttgcgtaatacttgttgaaggcttttgccaagcgtaatgcgtatttggcaatcactgatggttcgtattcttggctggctttgacaatcacatctgggaagttgccgagcatcttcaagacatcccaagcgttggcatctgaaacgactaagtcagcgtccattgcgacttcttggttggccttgcgcaagatactttgggcacgggcatttgtgtattgcacgtatggacctgtctcaccttcgaaacgcacaacttcttctaagtcaaagtcaaaattatctaaacgatcattcttcaaatcatggaaaataaccgcaccgatgccgacctgttttgcaacttcttctttgtttggtaaatcagggtttttggcttcaatttgttgttgtgctaggttaacggcgtcatttaaaacttcttccaataagatcacacgaccgctacgcgttgataatttcttaccaccttgagtaattaagccgaatggaatatggtgaatttcgtccgaccaatcgttgcccatttcttttaaaacggccttcatttggttgaaatgttcccgttgttcgccaccaacaacgtacaatgattgcacgaagtcgtatgtgtcatgccgatacatcgcagcggctaaatcacgtgtcatgtagagtgttgcgccgtctgattttttaatcaaggctgggttcaagttgtaagctgttaagtcgacgatttcagcaccgcgactttcttgtaagagcccttttgcttcaagtgcgttgaccacaccgtccatcttgtcgttatagaaggcttcaccattaaatgagtcgaattcgacccctaacatcgtatagatcttttggaattcctttaatgattcagttctaaaccatgaccataacttcgttgcttcttcatccccggcttcaagcttacggaaccatgcccgtgcttcatcgtctaattctggatgttcaacgtcttcttgatggaacttaacgtaatatttcaaaaggttcgtgattgggtcttctttaacttcttcttcactcccccattttttataagctacgattaatttaccgaattgagtaccccagtcacccaagtgattgattttaattgggttgaagcccacttttgtcaaaatcttggcgattgagttcccaatcactgttgaccgtaaatggcccattgagatgggtttagcgatgttgggtgatgacatgtcgattggcacgttgccccctttaccgaggtcactttggccgtaattagcggcttgcgttaaaacggttttgaggatttggtcgctaaacgtagccttatccaagaagaagttgatgtatggcccgttggcaatcactttttcaaagccggcttgatccatttctgcaactaagtcttgggcgatttgttggggtgctttccgtaatgttttcgctaagataaacgttggaaaagcatagtcccctaagtctgatgtttttggtgtttcaatgagttgtgctactttatctgctggtaaactgtcccctaaaacgcccattaaggcagtggtgacttgttgtttaaaatccatgttgatagcctcctaatatttgtgaacaaaaaaagtcccttccaaataaatgaaagagacgagaattcccgcggtaccactctgattgatcaatcgatccactcaatagtatgcaattgttcaaccaaaagcgcgccgcgtcaacttgattacccaccttacaccgtctgtgagctcgctataaatcgctgttgatgctattcttttgactgttcgaacttgataactagtatatagaacttagctgcacttttcaagcgcaattattctgccgcgagggcttcaattggatctaacttagctgccttacgagaaggtgctagtgccgctaagagactgatgataatgctgatgattatcccgaataggacgtagccactggtaattgccacaattggcatatgcgttaatggttgggccaacgtattgacaagcaattgtccaaggccagcaatgccggcaccaagaacacttgataataacccaatcaagaaggcttctgagacgaataagtgccgaatatctttctttcgggcgccgattgcgcgtagaatcccgatttccttcgtccgttctgacacactgatgtagagcaccacgataatcatgattgctgaaaccaataatgaaatcccggcaatcccagctaagacgtagaaggctaacatcaagtaagtgttaattgaatcgaggatcgcaccaacccctgtgatttggtaatccttttgtgtcttaccgttgactttgctagtgtaggttttgattttattttgaacggctttaacattttgggtcttattaaccgtgactgctgcaaagttgggtgcaaactctaatccttgcgcttggtacatcttggctaatgtgccatatgtgacggcttcagtcccagaattgatgatccctgaaactttcacatcttggcgcatttgaactggacgttgatccttactaatggcattgacgtaaatggttactgtccgaccaaccatcttcttgtaatttttatctaacttcttagccattgccttcgttaaaataatttcgttggccccaggtttagtcccggtcttaatatcttggacacgttcggttttattaaacgtttggaacatttggactgtttcactcttcttttgatagtgcacttggacaccattcatgtagtagcccttttcaaccttcgtcacgtttttgaccttattaaggcggttgatatccttatcagctaagttaccttgttcaccggcttcaatctgtttgctcgtgaggtttcttgcaatctgaatcgtatttggattaacttgcgatgaaatctgatcattaatatagccagtcaccccttgacccaagcctagcattaaaatgacggagaaaatcccaatggacgcgccaaaaataatgagcaaattccgtttaatatcgtagcgcatgtgttgcattgccattttgaaagcagacataaaacttaatggactactcttcttaattaccggaccagttggagctgggtaagctggttttaattgcttgtcataatcaatctgcccatcaaccatgtggacaacccgtgttccgtggtcagcaacggcttgtgaatgggttacggcgatgacgagtttgccatcttcggcaatcttttgtaagatttcgagaatctcggccgtattctggctatctaacgcacccgttggttcatcggcaatgatgacatctggatcagcagccaaggctctggcaatagcaacccgttgcttttgtccacctgacaattggttgggatgtttatggatatgttccttcaagccaacttgttccaataaggcggtcgctttggcaacccgttccttatgtgatagatcagtcatttcaagtggcaccatcacattttccaagttagtcaaatgactaattaaattaaagctctggaaaataaagccaatcgtttgactccgataagcatcaaatttcttttcggatgcattctttaaagatgtcccatcaacgatgagctccccatcgtattggtgatctaacccaccgatgatgttcagcaacgtcgatttaccgccgcctgattccccgaggattgaaacaaattcgccacggtcaaagcttaaattgatgccttttaagactttaaattcagccttgttcatataataggacttgtgaatatctttaatctctaataatgtcaatgtcgtacgctcccactacttagattgctcgtaagtgtcacgattttttagtcgatagataataaatatactttatcagagcgcctttaaacaaacaatcggccttaggtctgataacgaaaagagtgtgatgtaagtcgggtatccgccgaggattaaatttcagagaataaaaaaagaggttgcaacaaaatttcttctgttgcaacctcttttgcatgaatctttaagcgagtgacgggaatcggacccgcgacgcaagcttgggaagcttgagttttaccactaaactacactcgcattacttgatatagtatagcatattatttccgatttgtgcatattttttgaaaaaaaaaggtttaaacgcttaacaaatagcgtatgtatgcggtatactattgataacaacttgattggagtccttttaatggccgattcgcaaaatacaattcctgaatcaaccgcatttcattgccctgcatgtcaggcgccaattgaatatggtatcaaacgttgcccaggctgtcagactgcgatcttctatcgcgatatgtctgaaacattctggaacgatcgtaaattaaatctttttaaacaaacggatgccattcaacggggcaattgacttaaattaactattcaaccgtcactttttgtgacggtttttttaattgttaataattaattcagaaggcgttaccattgttaatttgatagacttcacgactcattttagccgcatttttaatttgaaaccaacggtgatggttgctataatggcacaccatacacaggaggtctttatgatagagaagaacaaaatgagtttatttagcctagtgatgctcggtttaagttccatcatcggttccggttggctgtttggtgcatgggaggcaacgaccgtggcaggcccagcagccatcatctcttggattgttggcgcaattgtgattggtgcaattgcctttaattacgttgaactcgggacgatgttccctgaaagtggcgggatgagtcactatgcccaatatagtcacggttcattactcggcttcatcgcagcgtgggccaattgggtatcattagtcacgattatcccaatcgaagccgtcgctgctgtccagtatatgagttcttggccatgggcgtgggctaactggacgaatcactttatgcaccacgctgaaatttcgaatcgtggcttgctcgtcgtctttgcctttatcatcgtcttcacccttttaaatttctggtccgttaaattcttgacccgttttaccagcttcattgcaatctttaaattaggtgtgccattattaaccattattatgttagtctcaactggtttccatactggcaacttcgggcattcaatggcgacgtttatgccctatggttccgccaaaatttttgcagccacttcgatttctgggattatcttttcatacaatgcctttcaaacagtaatcaatgtcggcagtgaaatccgtgattctaaacggaatattggacgtggaattgcaatttcacttgggatcagtattgtgatttatctactcttgcaaattacctttatcggttctgtttcacccgccttgctcgccaaagtcggttggcacggtttaaacttccaatcaccctttgccgacttagccattttacttggaatccattggttagccgtcttactttacttagatgcgtttgtttcaccctttgggaccggcgtttcctttgtcgcttcatgtgcacggacattagcagcattaaagcagaacaaacacatgccaccgattgtcggccgcatgaacgaacaatataatattcctcgcattgcgatggtcattaacgccatcgtcagcatgctactcgtttcaatttttagaagttggggaacgttagccagcgtgatttcaaccgcaacgttgattgcctatttaaccggcccggtcaccgtcatgtcattacgtaaaatggcccctgatatgaaccgccctgttcagtcaccttggatgaaaatcatgtcgccattatcctttgtccttgccagtttggcaacttactgggcaatgtggccaacaaccattaaggtgattggcgtcattatgcttggcttaccattttatttctactatgagtatcggattcactgggaaaatacttgggcccaattcaaaggaagcttatggttaattatctatctcgcattgctttcgctgatttcattcttgggcagtcgggaattcaacggaattaacctgattccttacccactcgatttcgtcttaattagcgcattagccctcatcttttactattggggaattatcagtcgcttctattcgaaatacttctcacgcgcaacacgaattaacgatgatgtgcaactttaagcatgactaaaaaggacgccaaacaacggttaaagttgtttggcgtccttttggtatctctagattgtttctgctaaaatgaatcgtaaagtacgttatctttttcgggaggcgctaaccaatgcaaaaattgaccgttcaatctactgatcgaatccatactttaaatgtcgtgacttggtttccaatccaaaaaccggtcgcagttgtccaaattctaactgggatggccgaatatatcgaacgttatgatgctttcgctcaattcttagcagatcgtgggattatcgtcatcggacacgatcatattgggcaaggccactccgttcagtccaacgatgagctcggttatttcgggccaaacgggctccagacgctagtcaacgattgtaccttaatcggtcgcattgtccacgaggaatacccagagctaccattatttgtgctcggacactcaatgggctcaatgctagcgacacaatatgttaagcaaactgaagtgccgattactggagccatcttcatgggcgttatcgatgtacccttcattcttaaacccgccttaccaatcgttaaattaatcggcgccattgcagctaagcgccccggtactgtctggaataacttggcgtttggggtctatcctaaacgatttgatgctcaccgacctttttcatggttaagttacaatcaagcaaacgtggcggcctacgaacagcatccattgtgtggctacgtcttttcaaatagcggttttgcaatgctcttcaccctcactgagttaactcggcatgctgattggcaacttgccttacaatcccgcccagttctcgtaatgagtggcgccgacgatccagctggcggttatggtcgccgcgcgcggcatttaacgaaccaattcaaaaagcgcaccgttaacaacgcaacggtgcgcattctacctcatacagcgcatgaaattttattagaaacagatgctacccagcattaccaattcatctacgattggttgactaaagtaatttctgaatctcctttaacacaccatagttctcattagtgtcggcacgataagtcgcatattggatcatatcgtcggcagcattccccatcaaataactatgttcaacggtttgcagcatttctttatcattataagtatccccgaaggccatcatttgcgccggcgtgatgttgaaataatccgccaaaaagcgcattgcatggcctttgtcgatgccttgattcataatatcgatccattcaacaccagcaaccgttactgaataagccggttcaaattcgggtgcgaaaacagcttcatactgtgcttgactatcttttcccgggaaataaatcgtaaacttgttggcttcaacactaacctgcgttaaatcaggtacatattcaatgttggcatagaattgccgcaaagtcgcgtcataatctcgatattgtgtttcaacgtacgccgcgtccatcccacaaatcacgccaatcccatctggcgtttgattaacgaattggaccatccgttggtaatcagctaacggcaataaacttttgaataaagtttcaccttgataaccaattgcacccccgttatcgctgacgtaaaccattgtgtcagcaagttcgggaaacatttgctttaacgtgtacattggtcgaccgctggcagctgcgaattgaacccctttagcatgtaattgctgaatggttggtataaagtttggtggcaactggccactctcagttaataaggtatgatccatatcggatgcgattaatttaattgtcatgcttagttctctcctatcccttagataccttaataatataccgtttatgccaattcatcgcaaccggttacattcaaaaataatcatactcgacatccatcgcttcgatcctgcccattaacacgcgctaaactaaataactcccccgttcagattccgatagtctctctaaaagatttgaatctcattgatattgaatgttcttttaaccgcgtcggacattagcgcaatttggttatcaatttcatcccaattggtagtaacaaatccagaatccaaactatcaatcatgtcattactgtttagtctaatctttaataataactgtttccccttggttgtaagtcgatagtatactttacgactatcaccaataaaactccccacattagcccgttcaattaatcctttttcacccaacgattggcattggcgggaaatagctggtcgagaaacgcccatacaagcagcaaggttgccgggcgtttcttctttttcacgatccattttttccatcaacaaatattgttcgagtgataagtcaacattttgcaaaactgtgacaaataattgatccaaaatattacgatatttaatgagcattaataattgattattcataataagcattactccttctatctattttgaggacctacaatatgcgaactagtaatcctgctctgctacacaggcattatattatataaattaattaaatgaccttttaatcgcgatgcagtttacagcttgtagctttcagccgtttttatagttcaaataataattatattgataagaaaatatttatttaaagctatcgttttctactaatggtttaattccttaaaattgatgcaactttttttgaatagtgctaataattgtcgctaatccattggctaaaccagtcataatgaggtaaataatcaataatcgatgtactttttgaacaaaaaaagaccgctatctaaagtgatagcgatccttttttaatccataatgcccgtggcaggattcgaacctgtacttggttacccaaacagcgacctgaacgctgcgcgtctgccaattccgccacacgggcgattgtgctacaagactattgtaccagtgttacagagccctgccaatacccatttattaatatttcgcttataataatagttgataagggagggattcagatgcaagtcatcacaaattcaaccgttcgtgcggtcctgcaggcacggcctgccatcagtcataaaggcgattttggccgcgtcttaatcattggtggtagtcagcaatacggcggtgctgcgattatgagtgcctctgcggctgtttatgctggtgctggattagtttccgttgctagtgacttaagtgttctcagcggactgcacgcgcgcttaccagaagccatgttcattgattatcaacaacccttcgtgcagtggtcgtctgcagtccaggctgctgatgtcgttgttgtcggacctggtcttggcattacttcgtttgccgttgaactgctgagaaaaatcttacaaaccatccaaccaacacaaacactgattatcgatggttcagcactatcaatcatcgcacatgaaaaactgacgatcccgaatacgcaactcattttaaccccgcatcaaatggaatgggcgcgcctcagcggtgttgcaatcaagcagcaaacggttgctactaatcaagccgcactcgctgcttatccaaacgcgactttagtgcttaaaaaacatcacaccgaggtctatcatcagcaacaggttcagcaactaaccatcggtgggccttccatggcaactggcggtagcggcgatacactgactggtattattgccgcattctgtggtcaatttggcacccactatcagacgatttgtgccgctgtttatacccacagtgcgattgctgatgaactcgccaaaacccaatacgtcacacttcctagccaagtgattcagaccttaccacactatatggctaaaatgattcatcaatcttaaaaaaaacagcagtccttttgaaagggctgctgtttattaattcgctttaagtaatgcaagttctgcatctgtcaacgcacggtattggccacggtctaaatcatctggcaatgccagtggtcccatcttaagccgttctagcgtcaagacttccttgccgaccgcatgaaacatccgcttcacttgatggaatttaccttcatgaatctcaacggtaatctgactttcttgttgcgcctcatcaacactcagaatttcaagctgtgctggttgtgcagtaaaatcactcaacacgagccccgcttcaaaccgcgcttgatcctctgccgtgacaatcccggcaatcgtggcgcgataaaccttgctgacgtgttttttaggactcaacaaggcatggcttaaatcgccgtcattcgtcaacaataataagccggttgtatctttatccaatcgccccactggaaacagatcatcccgcaagtccgctggtgccaataaatcaagcactgttttctggggatcagtcgtcgccgaaatcacacccgccggtttgttcatcagccaataaaaataggtttgataacgcacgggttcgtcgtcaacatagacaacggtcgcctcgttcactttgaacttcgcatctttgaccacagtcccatcaacgcgcacgcgtcccgctttaaaaagtacctttaattctttgcgtgaagccacattcatatgacttaaaaagcgatcaattctcatttgattctcaactttcttctaaaccgatccaagttactcccaatgacatagtccgctaagcgcgatttaagcaccaatgcggcgtaaacagccacacctaggccaacgctaatcattaagactagaacgctctgaagacggctgtacgggttaaagacaaggtataaccccttgactgcccccgccgttaccaaatacatcaccaatgagaagcctaaaacgccgattaagcgccgaatggttttgcgtaatgcaaagtgataatagcgatgcagtgctgcaatcattaaaaccgaacttgtcgcaaaggctaagccggtcgatactagcgggccatagacacggaaaaaataaatcgctgggtactgcgccacaattttgacgatgaatccgatgaataagtaaaacaatgccaagcggttctgatagaggccttgtaagacagcgcctaaaaccgtaaagaggccgagcataatagaaatgtaagatgaaaattgtaagacactaatcccaagcgtatcatgcgcgtagaataacgtgtaaagcggaccggcaaccgccgccatcccaaatgccgctggaatcatcactaagttgaataattgcaaagtactgccgatttgatgttgcaattctttttgattgccccgcacatgcgcagctgacatcaatggaatcgccgtgaccgccatggcagcagcgagtgaaacggtgattgaaatcagtttattcgcattagctgcaaataaagcatacaagttatacaactgatgatcaccggcaaccacgaaatcatgcatcatcggattaaacgtgtattggtcgatgatatagaccaagttgacacttgcgtcgattacgatgaatggaattgattggcgcacaatcccttttaacaagtcagtcgttgacacttctaattcgttgttactattggccactaactctgaaatgcgaccgcgttgtttcaaataatagaaaatcagtaataacaagccggcagcagccccaatgaatgcggcaaatgtcgcctgcgtcacagcatccacgtagctgcctttaaacacttgcataatcataaaagcggtcacggtcatgtacagcacgcgggctgcttgttcaataaattgcgaaatcgcagacggcgccatttcggcatagccttggaaaaagccccgcataatactgagcaatggaataatcaatagcggccagcttaatgaccggaagaccggtaccatccgcggatcacccgctgctagaacgggcgctaacgcaaaaagtgcgagcgctgataaaacacccattgccaacattaaaatcagcgactttctgaaaagacgctgaccaatgccatactcattcatttcgttataacgtgcaatttgtttcgatagcgcccctggaatcccagccgtcgagatcactaaaaagacactataaatttggtatccttttgcaaataatgtgttggcttgtaagaaattcgcgccaaaccagattggccacggaattacatagacggcgcccagaattcgcgagaaaatactcccagcggtcatccaagcggagccccgtaacatcttactttgtgaagatctatccgtcgcctttgtttcaggtgaattggtcatttcccataactcccttattaaacgtcaaaaagcatcttcctaccattttagaggattgccccaagccttgcaattcctttaacaaaactttatgaaaaagagtgcttctgatgacggttagcaactgagcattaatacaaaattcccaataatccaggttttaagattattgggaattttagattaagcggaagttgttgtcatcagaagcacgtttcaataagagtgctattagcgcttgcccagattttgagcactaacctaaaaacgggaattatggcgtactcggccatgattcccgttttgtagttaggcgcagaaatctagcgccaatagcacgtttcaaaaaaagagccccgccttcgcggagctctctgccatctcattatttagcttgtttactttgttgaatcaaataccacgtcaacagaatgctgacaaaaaccatgataccgccaaagattggtgtactgtctaagccccaagctgccgatgcttgcccgccaactaatgagcctatcgtaatcccgatattaaaggctgagatattcaaagccgaagccaatggaatatcatttggcgtgattttttcagccaactgcacaatgtataattggagccctggaacgttcatgaaggcgaaaaagcccatcaataaaacgttaattaaaccgaaccaatgggcatttaacgttaacatgaatagcaacaaggtcactaacaagccaacaaacattttcaatagcgccatcaacggttggtgatttgaccatttgccacccaacgtatttccaaaagccaccatcagaccataaataattaagatgatcacaaccgcccttggtgaccaacccatttttgattctaaaatcggcgttacaggcgaagactggcgcaaaagcgaccgtcaagttaccaatgataaagacaaccataatccccaacaataaatttttccgtggccaacgacttgttaaaatcgccaaaatcggtgccccaatcgtaattcccaaagcatacatcgatacggttagtcctgcttgactcatcgtaatcccaaaatccttaatcatcaatggcattaagccgacactgatgaattctgtcgaaccaatcgcaaaagcactgattgccaatgctagtaatgtgaggttcgcccgttgtttactactcatactgccacactcctattagactttttttactgatgtactatattattcaataggagcgtgattttcacaatcacgcactttttagtcagtaggttactgaaaagtaataattgagtcttatcacaatgaaaaggtgaatcaaaattagaaatgaatgagaaaacatataacattggcgttgaagctacgatggaaattatcggcggtaaatggaaacccgttattctttgtcatttgcgcaaccaaccacggcgatcaagcgagctcttacaacgcatcccaaagatttcccaaaaggtgctcactgcacaattacgcgaactcgaaaacgatggcatcatcaatcgtaaaatttatcaggaaattccgccacgcgttgaatacagcctctctgaatacggtcagtcactcaataaaatcttaaatctcctctgtttatggggcgaagataacattgatcgccgccaaacagcgggtgaatcaatccaatcgaataaaaaaaggcagccaactaggctgcctttttgcttgtcatgatttttgccgaccaaatttcacgaaataaataaccaccatgatcattaagaaaattaaaccaacaatgattgaaatccgcgtttccggattaatgaacatgaaaactagtgtcacacacaacattgccaaagtgatgtaattggaatagggtgaccaaggcatcttaaatggatgttgtgccatcttgtcagcgtgttgttttctaaaggcaatttggctgatcaaaatgacgaaccatggcaccatccctggtaagacacttgaactataaacgagcacgaagacattgccagcttttggataaacaagtggtaaaatggcgtttaaaatcaccccgattaaaatccctaatgaaatcgccccgaccgcataaaatgggacaccgtggcggtttaatttcaagaatcgttttggtaactgcccattattggctaatgtgaacgtcattcgactggcactgtaaatccctgagttagcacccgataaggctgctgtaatcactacaaagttaatgattgatgctgcagcggtaatcccaattttagcaaaggtttgcacaaacggtgaaccgacctgactcaattcattccaaggataaatgctcaagattacgaaaatcgccccaatatagaaaatcaaaatccgcgcaacagtggattgaattgctttaaccaatgttgattgtggattttcagcctcgccagccgtaatcccaatcaattcaatcccttgatatgatgccaagacaattgccaaggcgaagatgaagcctttaaagccacccgtaaagaagccgtgcgtccacaaattactaatgccgactggatgcatatggtttccaatcccaaaaacaatgagtccaaggcctgccacgatcatcagaataatcgtgacgactttaatcaacgcaaaccagaattccaattcaccaaacatgctgactgaaattaagttggccgcacataagaacgtaatcgcgaccagtcccggtacccagcccggcaagttcggccaccagaattctaagtaaccgccgatggcaatcatttcactcatccccacgacaacgaattggaagacattgctccaagctgttaagtaaccaaaaattggatgcatatattccgttgcaaacttggcaaaggaccccgtatctggatcaacatacagcatttctccaagtgcacgcataatgagatacagcaataaaccagcaatcccatacgcaatcagcacagacggccccgtccatttaattgtcgtgttggcccccataaaaagcccaaccccaattgtcccgccaagtgcaatcatctgcatctgacgggcagttaaatttcgtttcatagtcctcaaacccctctattttagcatcatcattattggttaaccccagaatctaaatttacttatcatcgtataataaaaaacacccaaaagcaatagtcgctctcatctttttatcatcttaaaagcgctttagaataacccttatattaattgaaggataattaggcccctaaatattaattttaaataagaaaaagcagttactgcgagaaacagtaactgcttttttgaaacatgctttttggttgcaacaacttccgcttaatctaaaatttcaaataatcctaaaacctggattatttgaaattttttattaatgctcagttgctaaccgcaaccaaacgcactcttgtctgaaacgtgcttttcaagctaactttctgcgcttatcccagtgaatcaaacaatcgactacgtcgcttattcgcttccctctgataatgctcaaaagttgaccgagcttgaacccactctttttgaaacgcactctaattggcgacgatattgaccaatttatttggaatggcaatcactttgcgcaccgtcttgtcagcaatgaattcagctactttttcatttgccttagccatcgcttctaattcttccttcggtgtgtctttagctactgttactttggcctttaacttaccgttaacttggaagatcacttctacttcgttagcgaccaatgctgctgggtcaaatgttggccagtccacgtaactgattgagtcatcatggccaagcattgcccataattcttccatcatgtgtggtgcaattggcgctaataacttcacgaagccttcagcgtattcacgtggtagtgtgtcaactttataagcatcattgatgaagaccatcaattgtgaaatggccacgttaaagtgcatgctttcgaagtcttctgtcactttcttaacagtttcgttgtaactcttcttcaattgttcatcattttcagcgacaatcttgcttgaaagttggtcgttttcgtcggtatcttcttctgtgtatagacgccatacccggtccaagaatttacgcgcgccggctaagcccttttcactccatgaaatggaagcatctaatgggcccatgaacatttcgtataaacgtaatgtatcagcgccaaagcgatcgacaacatcatcagggttaacaacgttcccttttgatttcgacattttttcgtggttatcgcctaaaatcataccttggttatataggtgttggaatggttccttcgttggcacgaccccgatatcatacaagaacttgtgccagaaacgaacatataataaatgaagcacagcatgttccgcaccaccgatgtacatatcaactggtaaccagtctttcaacttatcaaagtcagccaatttatcagggttcttaggatcgatataacgaaggtaataccatgagctaccagcccattgtggcattgtattcgtttcacgacggcctttgcgcccattttcgtcggttacgtttaaccagtccgctaagttcgcaagtggactttcaccagtccctgaaggcttgatatcacttgttaatggtaattcaagtggtaattgagcttctggcaccactgatgttgtgccatcttcccaatgaataattggaatcggttcaccccagtagcgttgacgtgagaataaccagtcacgcaacttgtagctcacttgttcatgaccagcattatgcgctactaaccaatcaatcatcttgtcgattgctgcttgtttgtctaaaccatcaaggaaatctgaattaatcatcacaccaggttctgtgtgaacagcttcttcaggattaccaccagccacaactggtttcaatggtaaaccaaatttcttcgcaaattcccaatcacgagggtcatgtgcagggacagccatcacagcaccagtcccgtatgaggctagaacgtaatctgaaatccagattggtaaccgttcgccattgactggattaatggcgtaagcacctgtaaaggcccctgttttatctttcgccaaatcagtccgttcaagatcactcttgtgttcgatttcttttaaataagcatcaacagctgctttttgttcaggcgttgtgatatcggccactaatttatgttctggggccatcacgatatagctgacaccaaacattgtgtcggcacgcgtggtgaagacatcaatctgagcgtcgtggttttcaacagcaaatgatacttcagcgccttttgagcggccaatccagttgcgttgcatatccttgacactttcaggccaatcaactaggtctaagtcgtcgattaaacgatcagcataagccgtaatcttcaacatccattgacgcattggtttccggtaaacaggatagccaccgcgttctgttttgccgtcgatgacttcttcgtttgcgacaacggtccctaaatcagggctccagttaacagccacttcagcttcataagctaagcccttttcgtacattttttcaaaaatccattgggtccatttgtagaaatcaggatccgttgtattcacttcacgatcccaatcgtatgagaagcctaatgaattgatttggcgtttgaacgtattaatattggtttgcgtgaaatcagcaggattgttcccagtatccaacgcatattgttcagcaggtaagccgaatgcatcccaacccattgggtgcaacacgttgaagccttgcatccgtttcatccgggccaagatatcagttgccgtataaccttcaggatggccaacgtgtaagccttgacctgacggatatgggaacatatctaatgcatagaaatttttcttatttttatcttctgttgttttgaacgatttgtgtgattgccagtaagcttgccacttttgttcaactgcgcgatgatcgtaagtcatatcaaacactccttttttttacgtgctttcaaaagcatggacacttttgacgcactcttttttaattcacttaacgccaataaaaaagtcctatggtatttataccataggacgaattgaccgcgatgccacctaagttctgtccaatctatattggacaactctctggccttaacgcggcagacgtttctatctactatcagttcaatagaaaactcaaaggcgagttcgttatgttaaacgacgtgttcacactaaccacacgctctctaaacgcttaacgataactactaatccttctcaacgttaaataattgttcttagcataccaaactcttacttcaatttcaagacttggccgactaagattaaatcagaatgtaaattgttcgctgattttaattgtgcgatactggtattatttttttgtgcgattgaccaaagactatcgcctgatttaaccgtataagtcttcccagaattcgtgttaggcgtcgttggcgttgtagcgccagccgttaattttaagacttgacctgggtagataaagttattcttaatattattagccttgattaattgcgccatcgaaataccgttacggttagcaattccccagacagaatcgccggccttaaccgtataagtcttcccagaagcttgccctggatttgtactatttgtattattgttgtttgaattaccagttgttgcaccttggctaaccactaatttttgaccaggatagataaagttgttccggatattattccatttaaccaagtcagccattgagatgccgtaacggtttgaaattgcccagacagaatcccctgatttaaccgtatacgtcttgtttgaagtctgattaccgttattgctgtttgaattattgttatttgtattgccagttgcggtttttgaaactgttagaacatcgccagggtgaatcatattattcttgatgttattccaactaattaaatcgttcattgaaatcccatatttgttggcaatcgcccaaacagagtcgccggctttaacggtatacttatcaccattagctggtgttgttggattcgttggtgttgtagggtctgttggcgttgttgggtttgtcgtcccaccattgttgttgccagctgcactacttgaaacaatcaagacttggcctgggtgaatcatattgttcttgatgttattccagctaatcaagtcattcattgaaatctcataccgattagcaatcccccaaacagaatcgccggctttaacggtgtattttgtcccattttcaggtgtcgttggagtcgttggcgtggttggagtcgttgttcccccattattgttaccagtattggtccctggcgtgtcatattgcgttaaattgtattgttgaatcaaacggttcaaacttgacgcataattggttgctgttgcataacgtccttgtaagtattgtgtggcttgttgatagctacttgtatggctcttaaatgccccttgataataaggcgttgcaccaaatgaagtattccgtagcacatgcacataatcttgtaacgattggtagtatgaaggatattttctaaatgcagcttggatctgatacatgttcccatgaccatcatcttcccaagtccacatataaacagaactaccattgtaagtcccttttaccccaaacaagttataattaggggcagaacctaaaccactgctcccaaatcctgattctaatgatgcttgggcaatcataacagaggcgtacaaatcgttatcacccgctaattgttgagctgaactagcaattgaattgatgaaattttgtgcgcttgaattagctactgccataacaacgccagcggttgcgatattggcactcgtactttgcactccagaaattggttgcgcttgagatggtgccggttgtggcgtagccacctttgtcgcttcattttcagtcaattgaggttttacaacaggttgttgtgttgattgggattcagttgtcgttgtgcttgaactagttgttgatgatgttgcactacttgctgtattagctgttgtagcttggtcatcattgtttgcactatttaacacatcttcagtggctgctttggcccgattcgaaaaactaggtgcaattgctgaacccatcaagacggttgcccctgcaaaagtcgtcacattacgaactttcttaattctaatttcccgcttctgcttatgtaagcttaccttttgagctgcaattcgctgttttctagtctctttcaattctaacgcctccgaatttccattattattgtctgtggcacaattaacttgagcttcacctgaactttattataatattaataaacggggaaaacaatcctatcgcgcaactacttttattagttgtcttatgcctaataattattgtatcatttaataatcttctttgtctttaattacagcttattttgaaaggatttcttaaaaatgaccaaacgattttcggctagtttattcattcttggcacaatcagttttctaatcattttaatcagcgttgtgcaccatgccacttgggttatacattttgatacccttatcagaactggcatccggtcgctttcctccccattgatggatactgtaagcattgcgattacgtcgatcggcaatccctatagtataatgactttgaccaccattgtaacgcttggtttgctgggctttaaacagtggtcagcagctagctttttagtcattaacatggtccttttttcaacgcttaaccactttattaagatgagcgtccaacgaccacggcccccatttcaccatcttgtctacgcaggcggctacagcttccctagcggtcatgcttcgggggcacttctttttttcggaactttaagcatcctagtttactacttaattcgtcaacgcgtttggcgaaaaatagcgattggcacctgtttaatattggcactatgcatcggccttagtcggatttacgtacttgttcattatccgagtgatgtcttagctggctttttattagcaacggcgtgtctcggcggttcatggtactgttttattcattttaaattattgcatctgaaggagtcctaacacatgatacttgatcatcccactaaatttgcacattttctattagaccaggcaattcggcccggcgatgtcgtaattgatgccaccgtggggcatggcgatgataccttatttttagcagaacgcgttgctgattttggtcaggtttacggtttcgaaattcaaaaagaagccatcgaaacctgcgcggatcgtcttacaaaagcaaaccaagcaaaccaggttactttgcttaatcaaggacacgagcggattatcactgccttaccacccgagttaaaagtgcaagccgccatttttagcttaggcgcactcagtcctgattcttttgaacacgtgacattgcctaacacgacaatctctgcctatcatcaaattctctcacggcttaatcgcggtggcttactggtattcgttgttgatcctcggttcaatgaaactcaagaagaaatcgactatctaatcgccgacttaagtcgcctagaaccaaccaattaccaagtaacccactacaaggcaatcaacgccgaccaaggacaagtcctagcgatagaaaaaatttagagtgcgtcgtaaggcgaatatccgctgaggattaacacagcgtcgtgaatgattacaacgtaatcgtttgcggctcagggttaaccggaagcggatgccttacaaagcacgtttagagtgtgatcccagtcgggtatctcttgaggattagcctagactggcgaatgattgctgaaagcaatcgtttgcggctcagggttaaccggaggcggatgccttacagagcacgtttagagtgcgtcgtcagtcgactatctcctattcaaacattaaaaaaaggcccagtcatcattgatgactgggccttttactatcttataatgtcccgaccacttttgtaccgtgtgcttcggaaatttgtaaacgttctgttaacgcgtcgacattgtcggctgtaatgccaccgccaggtaaaatcacaatccgcccatcagcagcttgaattaacgtttttaaacgggcttcgtcaatgggcgcgtctaacggccccccatgcgttaaaatccgtttaacatcatgatcaatcagccattccattgctgcagcttgttgatcagccgcaatttcatcgaaagccatatggaaaacaacttgcatcccattggcagcaccaatcaacatttccatcgcttcttcgtcgatttgattgtcaggtgttaggcaaccaaggacgatgccgtcagcgcctaattcttgcgctgaaaagatatcagcttccataatttttaattcttgatcgttataaacaaagttgccgccacgcggacgaatcatgaccatcactggtacatcgtgttcatgcgcataacgcactgattcagccatcacaccccggctaaccgttgtgcctccgacagccaagttgtcgttcaactcaattcgtttagcaccattgcggattgctgccggaattttagtgaaattttcaacacaaacttctttgattaacatggatgaaccctccaaattttaatttaatcctttatgcaaatagcattgcacctaagacaagtaggcccaagataatccggtaccaaccgaagaccttgaaatcatgtttcttgatgtaatccatcaagaatttgattgaaataattgaaacgatgaatgaaaccaacatcccgactaataaaatgattgattgatcgcccgtaaacgtattgccttggtacaagaatttaccaatcttcaagattgccacgccgaccatcgttggaatcgccatgaagaacgagaattccgcacccacaaaccgtgatgtccctaaaataattgcccctaaaatcgtagcgcctgaacgggatgtcccaggaataattgataaggcttggaaacagccaatccaaaaggccgtcaaccaaggtaacgtatttaaatcagcaaatttcggtgtggtatgcttgttgcgattttcaatgacgatgaacaaaaccccgtataaaatcaacatgctggccacaatccagtttttcatcagatgttcatccatccagtcattcaatgggaatccaataatgactgatggaatcaccgccacaattaccttaaaccataacgtccacgtttgtttttgttcgagctggttcttacgtggtgagaaaggattcaatttatggaagtatagaatcacaaccgccataatcgctccaaattgaatcacataattaaacatatcgatgaatgcttttgattcatcaagtttcaaaacactaccgaccaacactaaatggccggttgaactaattggtagccattctgtaaaaccttcgacaatccctaaaatgattgtcttaatcatatttaaagttaacacaatactaatccctccgtaatccataatcgtttattagtatactcattctaaagttagattgcgactcaaattgaaagcttaatcaaattttattcaattcgcccgcaggaaaagccaaatgacgttgatccatcactgcttgaaaatcggctggtagttcgctttgaaccgtgacataccgttcttcaaatggatgatagaacgttaactcgcgacagtgcaatgcttgacgcggtaataaatcatcggccacaccgtataaattatcaccaattaagggatgccccagtgatgcaaaatgaacccgaatctgatgtgtccgacctgttagtaacttcaacttaactaacgtggcatcggtgccatgggcttcttgccaatattccgttaatgagcgtttgccaccaaccccaacgacccgccgcatgtaaaaatcatccgaccgtttgattggccgatcaatccacgcatgttgcggataatctaaccgcatatcaccactggcaatcgcaacatatgttttttgcaattctttagattggagttgcttatccaacaaactatgcgcgaagccgtgcttggtgaacatcatcaaaccacttgtatcgcgatcgaggcgcgttactacgtgcactgcctggctctcagcattttggtcaatcaagtattgtttgacgaaattggccattgtgttgtgcggatggttcggtgccggtaacgacgccacaaacgccggtttatcgaccactaaaaaatggtcgtcttcaaaaaccactttcaagtcccctttaactgggatgacgtgttcgacggccacttccggtgcgaggtaaacagtcaccacatcgttttgaaccagttgggcattggtatgtgcctcctggccgttgacgaggattgtgccacctgcaaatttaattttagttaactgactgcgagaaagcttatgccgccgtaaaaaattccgcaacacacagccttctgcatcttgatattgccattcaaatttcatgttttgacccaataaatgcatcttcgacacggttccagaaatgggtgtgtcgataacgtgcaaactgtattctttcctttgcaattttaaattgcatcgaggcaattggtcgatccttaaatgtgaattgatcaattgtcacaacgtaatcacttgtcttagaaggcttcaggagcaaccattcatccgatggtaacacgattggtgccgatagtgttcgatatacgcgattattaatcgacgcaatttcggtcatctgcatcgcgtctaagcgtggatgtaaaaccgcgccaccaatcgacttactataagctgtcgacccagttggtgtggaaatacagagcccatcacccctaaaactttcaaaaaaattctctttaatgtaaacgtccgtccgcaaagtcgctgcataccgacgtaacgtcacttcattgagcgccaaactgcgactgatttcgtgcgcatccgcatattcgattttaacttctaataacggatagctaatactctgcccgagatcttcttgcaaggcgacgactagatcatcgacttcaaaatcgcgccagtcagtgtaaaaccctaaatgtcccgtgtgcacgccaataaaccggatgtgcgctaaatcgtgggcgtaccgatgaaaggcagataaaagcgtcccatctccaccaactgaaatgaccacatcgggcgtttgatcatcaatgacaaaccccgtattgatcaatttttgcgttaagcgattggcaacttgaacggaagaactaccgtcattgctaaataccgttactttcaatctggcgtctctccttcagaatcattttcagttgccttttcaagtgcgttttgccattttccatatgagaagagttgttgtgcttcttgaatttcttcacgaatttcagacatttctttatctaacataaaggatgcttcggccgctcttttaagccgcgccttcagcgtttcaggaaattccccttgatatttataatttaatgaatgttcaatggttgcccaaaagttcatcgacattgttcgaatctgaatctcggccaaaatcaatttttcaccactgattagttggactggatattcaattacaatatgatatgaccggtaaccacttggtttaacatttgaaacgtaatcccgttcttcaacaattttcatatcagtccgttggtgcaaaaggcccacaatttcatggatatcttccacaaactgacacataatccgcaaaccagcgatatcttgcatatcttgttcgagtaaatcttctgtaatgtagcggcgttgcatcttttctttgatactatcgattggtttaacgcgcccagttacaaattcgatgggtgcatgttcattattttgttggtattgcttgcgcatcccacgtaatttaatttttaattcgctaacggcctgttcataaggcattaaaaacttcttccaattttcgaccattataaacccctcattcactctgtcacatacagcactattttaacatagattagaattgaataaataataatcgtctgaaatacaaatttcattacaagtctgcttttttgtgctaggataataacattgcttttttaaaaaggagctcaaccgatgtcacaaacgattgaacgcgaatttaagacgatgctaacggcggcgcaattctcgcaactaaaagcggactatccatttgcagcgccgtttgtgcaaaccaattattacttcgaactgcctaaccagggattggctaaacgtcactgggggttgcgtattcgactctttgacacctatgccgaacagacgctaaaggtgccaaccgtagaaaatgctcatagtctgattgaaatcactgatcgcctaacacttgagcaggctactcacttaattgagcaccaaaccgtattatcgtctggtcagatcgctgtctattttgcagcacaagccgtgattatcaaagaattgttcatctggggacaggcaacaacgcaccgccagaccgcgtctttagttgctggcctgttaacgcttgatgttacccaataccctgacgaaacccaggattatgaagtcgaaattgaagtcaccaacgtccaagaaggggcaacttggtttaaatcatttgtcacccgctatcaattaagtgaacaaataccacccaataaaattatgcgcgcccttatccatcaagcttaaactttgccaagctaacttattgcataattttaaaattttgttagagtagacagtacaagcgcgtcgagcagtatatacaatatagaaagtttgggggaaccaacttgttagaagtgtttttatttatcaacccaatcgggcaactttgtttacgttccgaagaggcacttttaaagattatcggcgaaaccgatgcaaatattcattttaagtttattccagtcttaaacttaaaaaacgtcgagcattacatgcagtttcagcaacaaaatagtcatgatttaaacttacgtaatcacgttttcagcaccatttatgaagcagtactcgcttataaggcagcaacgttccaggggggcaagaagagccaatcatttttaatgcaactgcaacaagcattccgtgaaccagatatggaacttaacaacgaattagtccttacaattgctaaacgcgtaggacttgataccgaaatgttacttgaagattggcacagtccacttactaaacaggcatttgattcagatcaacaattatcttgtgagatgaacattcagatgaccccttcagcagtagtcttcaactattcaaaaggtgaaagcgaatcaggcttattgattgaaaattgcgattcctatgaactcttgaaacaagcctgttgtgctgaaacaacacctgaacagactttccaagcacttcaaaaacaaaaaagcaccctctcacgggttgctttgcatgttatttcttaatcttagaaccggtggtcaaccgacccccggttcttttttaatgcttgtttcaaagctatttgcccccattgtgcaaataaggattgctttagtagtggttgttggagtaagggcgttaccgctaaaaaaagatcaattggttgggcactcaaccaccacgttacccgactttcaaactgactgagctgataaatgggtggtacattacgtgtgcagtaacaccagtccggaacggcttgcaagcgttcatggtgtgcataacaatccgcctgtaacgcaacataatgtgcgtcttgcagccctaatcgacggtcaataatttgttgctgcataggctgtgacttgcccttataatgattggctggcagtcttgtttgtgctacaagcaagcgcacaaacgccttagttgtcaatcgcagggtttgccaagcataaccagcaaaatcacgggcgacaatatggtgatataacacccatttcccccactttggcaaataacttaccacataaaagccccactgccgccgatagttgataaaccccaactgttgctggcttaaataatggttagtaaaacaataccgttcaccaaccacccataatacaggtaatcggcgctgctgatagccgattgttcgttggtttaacttatctggcgtcaatgggctgcattggtattcaataattaatggttgctgattccgcgttaaccatacatcagcgcgctgtgtctcgccgacaggtacttcaaaggtagcatgccagcccaacgcatgtgctaattcagcaatcgcctgttttcccgccagatgggctggactctcaccaccaccagatacacgttctgcgatatgtgcgaaatatggtgctttatgcaccccacgatgcaactgaaccagttgttgacaatgtggacagaaataccgcgctacttgctgttgtttggctgcttgatcggcgcgaattaagcacccgttagtggtctgtgcaactttcattatttatcacccccaccgaaaatacgcaaaaaaataacgggttctcctaaatttaggaaaacccgttatttttaatgtttgaagtagtagcgtgttaactcaagcgcactattatccatgactttttcaccgaattcacttaaaaaagctgctgtgtattctgacttctgcccgtattcattagcgaccgctaaatcatcccgtgcaaacgcttcggtcgtattctccataaaaataataatctgtgcatagtactgatgtttgtaaagaaataggttcgacacaccactttcgatgtgtagctgttgtgccaaagcaatccaatcgtcaaatgacttaaacgataacacaatctgtttcattggattgtccgcttgattcatataagcggtcatttcatcctcttcctcagtcgcatcatcttggaccgtatctcgtttcaacagttgttctttaatgtattcagtaataccgtctttgccttgcaccatttctgattgacctttaccaccgtcaaagtttggcatattcttactaatcagtaattctaacccttgatcgttaggcaacacttggaacgttactgcatcgttgttcgcaaatgtgtgttcactgtccacttcttccagaattgaatagaagaaccgctcaatctttttatgattgctcaacaaatcaagtccagtaatcccgcgttcttctaaatcatcattttctaatagaacccgaattgtgttctcgtcgattttttccattctcatgggacaacgcccctttctaacgcgcttcttatagcgtcgtaattcactttctttgacctaccataccagtatctggcgtaacattcaagtatctacatcgcagcaattaattttttaacccatcaaaaaagtcgaggctgttaacagccccgactctcctctagaatcctgctagtaattgtgcttgttgtaattccaatgcccgtacttcacgtggtaagaaacgacgaatttcatcttcgttataaccaacctgaagtcgtttttcatccaaaataattggacgacgtaatagccctgggttcttttgaactaaatctaataattcgttgattgataagtcatcaattttaatgtttaattcttggaaaaccttagaacgcgttgagataatttcttccgtgccatcttcggtcatgcgtaagattgttttaatttcatttttattgagaggctccgaaaagatattgcgttcttggtatggaatattgtgttcttctaaccacgcccgggctttacgacaagatgtacaacttggtgatgtatataacgtaaccatatgtctctctcctttattaacatgacaccttacttaacaataagacaatcattttctcttttacaaattttattatacgcgagtcagcactagaaaactaccctaaaattaaatttattaattattttttaataattaataaatagacatttggacataaaacgtctaattaaaacggtttattgttaaattttcccactcaccattaatttttatgtttttacatttatatttatcattcaaaaaaaattatagtagtttctactttctaatgaaaattcacttattttttgtaagttccatcaacgccgcctatattacatgctccgacatcaattgtcaaatcctgttgggcaactatcacgggtacgtccccaacagtcgcttgtgcttgtgcctgtagcgtttctgccgaaaccccttgtggtaaatgcgttaatagaattttagctgcgccactttcttgtgccaagttaccggattgcgttgttgtcatatgcgccattttaccagtgcgatcttcaagaaaattcgtatcagtcatcagtaaatctgcagactgacaaaaagcagctaattctgggaaatacgccgtatctgcagtaaagaccaagacctgccccgtcgtttgttcttcaattcgaacagcgaatgctgggacaggatgcactgtccgtttgaaagttactttcaacggccccagggtcagctctgtgtcttcttgataaccaaagccctgcgtcacacccggttgtgtcaaactgccaaagtggagtggatcttgcagatgcccgtaaataggtaaaatgggttcctttttggttccttgatgcagttgccaataatattgtaaaacccccacatcagcaatgtgatcgtgatgatagtgcgtgagaaggaccacatctagttgcaatgggtcaaattgtttctcaagcgctaataaagcgccactcccacaatctagcaataaatgatacgccccacttgttaataaataactactagtcccaacaccggcgtatggatatccaccgtaataacctaagactgttaattgcatttttaaatgaccacctttctaatttctatagtagcgcattccgggtatcgcgcgcactatatttactaactaaataaaaaaagaccgccttgcgcaaatgcgcaaggctgttttttaatttcgttatgctaaataatcacgactccagatgagccccattactttttcgccggtgtgcacgccgaccacaggaccaatgtgactcgtttcaatcggcatccctgggaatgtttccgtcaacgttgcgacccactgcacactttcttctggattattaccgtcaatcacgctaacgcgtacgggatagtcaacagattcgactgctgctttgaaatccgctaatactttttgaaaggcccgtttcttggtccgttccttcgttaaggcaacaatttggccggcatcgttaaaacttaaaatcggtttaatccgcaaaagattcccgacaaaggccgcactattcgaaatccggcccgttcgcaagaggtggcttaaatcatccacaacgaaataaacgcccatcgttgctcgtaaagctaccaatttcggcatgatagttgcggcatgttcaccttgggcaactaaccgcgccgcttccaaggccaagaacccttcaccggcactcgtaatcttggaatcaaaaggatacacttcgatgccttcaaccgactgtgcgtaggcggttaggttattgacaaagctcgtaataccacttgaaagatggatacaaatcacttcatcgtagcccgcttttatcaattgatcaaaaacctgttgcatctgacccattgtaatttgcgaagtcgttggtaatttttcagtagtgcgcattttatcgtaaaatgcttcactcgtgatatcgatattttccaaataagtttgttgtccaaaaataacggtgattggtaccacagtaatattatggtcggcggcaacttgtggatctaaatacgccgcactatcagtcacaattgctgttttcatgtcaggctcctcaataaaactgtttttgtcattatcccaccaatgtggataaagtacaaatgaacaacaaaaaacgccggaccactttctgcccgacgccacagttattaatgagtcattgattcattctcaaatacgacaatggagatgtgcccatcaattaagccactgttattactcaaggttaacatttgattcttttcgttaacgtctaatacttcatgttcatcaaagtagccagctgcataatctttgtagtaaacagcccctagatttgattcaaattcatctggataatctttaatgtcagcatccgctggtactaatagcaatctaaagttcgtatccaacgagcaataaccaacgtttgaaaatggaccaacaccgtcatctaagtccaataaaattttttgacccggtgtcatcttatccttgattttcgcaactgctgcaggtgttatttttaatgccatatcaatcatccccttcatgctttcagtctaccgccgttttaaatttgacacaacctatctgctcagccggtgtgctacaataggcttaaccgtttatttaaggaggtcattatgcttttttatcggtattcatactttagcaatcagaatgatttcgaattctatctcaaactaagtctgtcagtgatcatcgccagtttaatcatcatcttcttcgttcaatatctccgccaccgttcagattcgaagtaccgtgacttactaatcatcttcggcttagttgggattttactcgccggcattcaatatacacggattcaacagcttaacaccgcccactcgcaacaagcccagatggcgcaatttattagaagtgtggcgactgcgcagaaagctagccttaaaaccgtcgcagtcaacacgacttcgcttcagcaaaacatggtagtgcgcgtcggtcatcaaaactaccaagtcatatttgataacaattttactagttatcaactccaaaaagctcagttgattagccaagacatcacctatcaagattaaggagtttactatgccatcttatttcgatattaccattaaattaattttcggtttcttctgtttagtgttacaaatcaacctctctggcaaggggaatttagcccctagcagtgggattgatcaactccaaaattacgttcttggggggattgttggcggtatgatttataatgccgatatctcgctcttacaattcttactcgttttactcatctggaccttaatcgtcttcacaatgaagtttctaaccactcacaatcgctggattaaacgctgggtaattggtaatccacaaacaattatcaccaacggccacattgatattcaaacggcctctaagaatagtttatccgcacaggatctgtcgtttaaactccgaattgccgggattagcgatattcgcacggtcagtcgcgcaatcttggaacaaaacggacaattaaccattacgcaaaaaggcgacgccacgattaaatatccgctgattatggacggccagattaattcagaagcacttgaattaatcgatcaaactgaagaatggctcctcgccgacattcaacagcaaggctacagtcttcaacaaatctacatggctaactacttgaaccatgaaatcgtgattacgccctattaaaaaagatgacccgcaaaggtcatcttttttaatgtcgtactctttggagaagcgttgcaaccaaccagacaatcgccccgccaattaaaacaatcgtgcttgtcttcaaaccataatccagaacagccaacccatagtcggtaattgtttgattaaaatcgcccgctttttgagcaatttgttcaacaatgccactatatttaaacgcagccgcccctagtgccaagaataagccactccaagcaaaacttgcaccaacactccctaatacataccggaattgaccacttagtccccattgaactagtacaagaacaattcccataataattgcaacccaggttaagatattgatcacatttctaacaaacaacatctcagtcgctagtggtgctaagtaaggtgcttcaatttggttcgtgaggtattcttgtagtggtggttgaaccgcaactactgccgttttaattaaagattccgtcaacgcattttcaggcacaactgcttctaaatgggctgcaagttgtcccatcatttgtgctgtgggtaacggcttttcttgtcctatataaatattatgaacagttttctttaaatcggcccgcacatcagattgggtcagtaatttgacttgtacttcagttggtagcccatttttttgtgccgcatctaataaaacaacgttaattttatcagtcatcgcagctaacgtcttcggttcactgagctgttcttgcgtaaatgattctctcaaaactgtccggctgagaatcatgccactaatgccaaggaaaacgcaaagaaagattaagaacgtcaaaaagcgacttaaacctcgatgtggtcgcacgcttggttgattttgattcaaacgactaattggttccattgattaaacaccctttctattcacgaaccctattaaacttcaagactaggattcttaatcattaaatgctaaagtgaacttatcagtcacaggaggccattcaatgttaaaaaatttaacgattctctatatttcaattgctggtaatacacgttcatttgtaacggatttacaggattatgcggcgcaacaacatgctaataacccagcgttaccaaccattaccctcacagaaatttcggatgcgaccccctttaaagcggagaccgaaccgttttacgcgttcgttccaacttacttagatggtggcaacggcattgataatggcgttaaagaattaatgaccaatagcttaggcgaatacatcgattatgcgcagaacgcacgcctttgttatggagtaatcggtagcgggaaccgcaacttcaacgaacaatattgcttaactgctaaacggtatgcggtccaattcgatgcaccgtttatcgccgattatgagctccgtggcaatgcgaaagatgtcgcgcggatttataccttaatggtcgctaacgcgcaacagcatgcctaaaatttaagattagccggtaatgatgtgattaactcggtgggttgttggacaatttggacagcacccgcctttttgagttccgcgattgtgccaaacccataactaacaccaactgcattcatcgcgttttgcttagcgcccaagatatcattttggcgatcacccaccatcagtaatggtgcggtttgtggtgatagaccaagttctgataatgcgtaagtaatgacatccgcttttttgacccgcgttgtctcatcaacacttgctccaaaaacaccgctaaagtaatcacttaactctaaatgatcaatgaccttcttagcgaatggttctggtttcgaagtcgcaattgccagttgtaaatcctgtgcttgcaatgccgctagggtttctcgcatgccaggataaagttgattttcatacaaccctttaggcgcataataggcttgaaagactttaatagcttcttgagtagcagctgcatttaaaccaaactcacgcataattgtttcattgaggggtggcccaatgaatgtgaccagttcagctttggtttgcgtcggcaatgataactcctcaatcatatattccaaggcgttcacgatgccttcttgcgaatcggctatcgttccatccaaatcaaataaaacggtcccctttgtcatatcaatcatctctcgatctcttataaagtaccttcattttagcatactctttgaaccttaaactttccttattgcttttttcataaatctataaacctctggtcacaaaatcttcacaaattcccattatagtattgagtatagaaaagcgaatcttttctatttcatactacttaactttttcattttactcctccaaagtaaaattaaggtagacgcaatctaccacgcacgtattattcccccaaagtaatacgtgtaccccttactcctttttagatcttcggatctgctagaaaccagtctccccaaggctggtttttttgtgtccccatcaaaaaagccgccagaacaatttacgttctggcggcttttctcatttttaaagtaggtactgttgcatcagttcaacggttttgagctgggcatcgtctgatactttatgttgcccattttcttccgtcgtcaatgtcactaatgcggtggctgaacttggttgcgcctgaatttcggtcataaaatctgccgtgaattgatatggcaccatcgtatcagcagttccatgatagaaatgcaatggacgtcctgccaagtgatcaacgtgcattgataagtcatacgccgctaaccgtgctagggtatcttcaatcgcatcttgatacttggtttgcaaggccgttggtaattgactaacctgccatttagcaagtgcgacaggcattggtgcgccaatcttatcaacgccaattttgacattcggatatcgggtgagaatcgcatcggttgtaatgccacccatcgaagtccctgtaacaccaatccgttcaggatcaactaagccttcagcgctcagtgttgcaaccagttcaccaaactctgtgaccgactgcatcacaatgtcccaaaattcaaacattaactcagaaaagagctgactaccatgtcgtttaccatgatacttcgcatctggtaagaccacgcgaaaaccagccttggctaaaaagtgggcgaccattaattctgactctttacggtgcgtccaaccatgatatacaaagacagttggtaataccgctttttcttgaccacttggggccacaatcaacgtactgactgccccaatttgccgttcttcagtgctaatcatctcaaatcctcctcaattgccatttatttcccgggtaatattaaccgaagaatgaacctgtaatcttaaaacggcgtttgatataaatccgcacgccgattaagagtgctgcaattacgatttgaacaagtggtggcaagactggattcaagaaacttggaatcaagattgtcacaccgtatgctgcaacaaaagccagtgttaagccgattacaaccaatgccatcttccaaaatggtggccgttgttcttttggcatttgcgtatagcgcattggataagtcatgatgacccccgcaagtgcagccgtaatgacaattgatgtaatcccaatgctggttgctgaccccttcgttgagaaataagccgcaattccgttaaaggctaggtacataattaaaaagattaagccattatcaagcatttggagttgaagtgatgtttgcttaggacgttttggtgcgtgcaacaattgatcaaccttggttgccactggaccatatacttgcgttgcaggcttgcccttatgttgttctgctaccatttctggtaacatttctgccaagatttcagtttggcgttctgctggcacttgttcggcatttaatgcgcgtttgaacttaaataaatagtccgcatttttcttactgagttttgcttctaacccttcaatatcaactggttctggggttactactggttgttcgttcttagccaattgtcttcctcctcaattatcattaaacgttaaatctgaattcgatgatgtcgccatcttcgaccatgtattctttaccttctaaacgtaaacggccagcttctttaacagcttgcattgaaccgtattgatctaaatcggcaaaagaaactgtttctgcccggataaatccgcgttcaaagtcggaatgaataacaccagcggtttgtggggccttcataccttgacggaaagtccatgcccgggtttcttttccaccagcggtaaagaatgttgctaagcctagtagatgatatgaagcacgaatcaatttatccaaccctgattcagtcaccccttcggcttccaaaaattcagccttatcggcatcatctaatgaggcgatttcttcttcagttcttgctgagatggcaattacttcggcgccttctttagctgcgaacgcttgaatttgtttaacataatccacactatcaggatcagccatggcatcttcagcaatatttgcaacatataaaaccggttttgatgttaataagaagaagcctttaactaacttcgcttcatcttcattaaattcgatcgaacgtactgagccgccttcttcaagaacaggcttaatctttttaagcacttcgaattcggctaaggcgtctttgtctttcgtccgcgcaatcttttcaacacgcgcataacgcttcgtaacactttctaaatcagctaagctcaattcaaggttaattgtatcgatgtcgtctaacgggtcaacagttccggtaacagaggtaatattatcgtcgtcaaaggcgcgcacaacatgcacaatcgcatcgacttgacgaatattttccaagaacttgttcccaagcccttcacctttgctagcccctttaacgatcccagcaatatccgtaaattcaaaagtcgttggcacaatctttttagccgggataatttcttgaatccggtctaaacgcttgtcagggacttcaaccatgccgacgttagggtcgattgtggcaaatgggtagttcgccatttcggcgcctgctttcgtgatggcgttaaataacgttgattttccgacgttgggtaatcctacaattcctgcggttaatgacatagttttttacactttcctttactttaaaaattagtttggttgggaccttgttgcatctcttgatagtggggttcatccgcaacaacgacttgtgctgcaggcaccaaattcttcttaagtttcttttcgaattcacggcgcggtaataagacggcgtggccgcaccccatgcatttaattcgaatatccatccccaagcgcaccacttcaaagcgattggtgccacaggcatgttgttttttcatctgaacgagatcgcctaatgtatacatctagctcgactcctcactttaatcgatattcacatctagcaatgcaagaatccggtttaaatcatcgactgtgctgtaatcaatctcaatctttccgcgacccttgctgttaatcgcaatattgaccttggtgtcaaatttatcgaccaattgattttcactcgcttgaatatagggtgatttaatcttggtcttcgtcactttcgcagctttaatctggttcatctggttaattaactgctctagttgtcgcaccgttaagccttcatcaatcgtgcgtttcgctaatgcactaatctgactttttttcttcaatgataataacgtccgcgcctgtcccattgaaaggtcaccattttgtaataacgtcttcacgtcattgggtaaacccaataagcgcaagtaattggcaatgtatgggcggctcttgcccaaccgttctgatacttcagcttgagtcaggtttaactttttcaagagtgtatcgtaagcttgggcttcttctaacggcgttaaatcttcacgttgcaggttttccaagaccgcaatttccatcattgcggattcatcaaactgccgcgtgatggctggtatcgctgttttaccagctaacttagacgcacggaatcggcgttcacccgcaattaattcgtaaccattaatacttttgcgaacaatgattggttggaaaacgcccgacttcttaattgacgctgctaattcagccaaagccgcttcatcaaatgtcttccgcggttgatagggatttggacgaatatcatcaagtgcaatctcttcaactaattcatccgcccggtttttattagggccttcgaacgctgaaaatacagcatccaaaccgcggcccaatccttttccatttctagttgccatgagctgctaacacttcctttgccaaattttggtaaacttcagcgccccgtgattttggatcataatcaatgattgatacgccatgactaggtgcttctgctaagcgcgtattccgtggcacaatcgtgtcgtaaacccgatcaccaaaatacttacgcacttcttcaatcacttgagcccctaaattcgtccgcgcatcatacatcgtcaacaacacgccttcaatcgctaagtttgggttaaaatgtttttgcaccaaacgaacggtgtttaacaattggctcaatccttctaaggcataatattcactttgaactggaatcatgattgaattacttgccgtaaaggcattgattgaaagttgccctaatgaaggtggacagtcaatcaaaacgtaatcataatcggctaagactggttctaaccctaacttcaagcgcatttcacgcgccatctgtgatgttagctcgatctctgcccctgcaagttgaatcgtagctggaacaatgtctaagttcttatgtgatgttttaataattgtttcttttagtgggaattcatcgaccaacacatcatagatatctttttcgacttgggatttttgaaccccaatcccgcttgtcgcattcccttgtgcatctgaatcaatgattaacacgtgattgccagcatccgccaaacaagcgcctagattaatcgtggtcgttgttttaccaacgccacctttttgatttgcaattgaaataacgtgtgccataatgagcctcccttattgctttggaatttcgatcgtaatccgataaacatcatcttgttcttcttcggtggctttgacggcaatcccgctttgttcaaccatttgaaccgactttttgatggtgttgacggcaatgcgtgtatcatgggcaattgctttttttgctttatcgttcgcttttttagccttcgtggtagcttcttttaaactgtcatcggttgcatcaactgtctcctcagttgattctggttcaggattcaacgtcttgttaaccagcgcttccgtatccttaaccgttaattgttcagccaagatttggtgtaaaatcatttgttgcttgaattcatccaaccgtaaaaggctccgaccgtgtcgttcagaaatttcatgattcatgatggcttcttgaacgggttgtgagagtttcaatagccgcaacttattagcaacaaaagattggctcttacccatcttttctgccaagctggcttgtgtgaagtcgttcagcttcattaagtccttataagcttgtgcttcttcaacggcggttaattcttcgcgttgtaagttttcaatcaaggccattgaagctgtttcgtgatcatccatagtttgaacaatcgctggtaattcagcccatttgagggtttgaatcgctctaaaacggcgttcacccgcaataatttcatatttttgatcttcatattcacgtaagataatcggttgcaataagccgtgttgttcgattgtgcttgctaattcggcgatattgtccgcattaaatacttttcgtggttggaaccggttaggcacaattgctgaaaccggcactttgatcacttgattaatacttttatcgtcttttttcttattaaaaaatgagagtgccattatttttcctccttagccattaacggttttttaactggcacaccagcccgccgtggatacttggcaggtgtcggtacaaccttatcaattacgattagatgtcgttgatcatctgtttctggtagcgtcaaagcaatgtcttgtgcaaattggccaccaagtgtttcgattgcatagttggcttctgccaattccgtttcaccttgactcgcttttaatgcgataaactgcccaccaactttaacagttggtaaacagaattctaccagtacatttaatgaagcaacggcccgggcagtcacaatatcaaactgttcacgatatggactcttcgggttgctgaacagttctgctcgatcatggaccaacgtcacatcagacaagcctaattcacggaccaattcttctaagaagtgaatccgcttgtttaatgaatcaacaatcgtaatcttcaattgcgggaataaaattttgattggtaacgatggaaaacccgcgcccgcaccaatatcgcagatcgtaaggggttcagtgcgtagtttttcaagatacaaagttggtgtgacagaatcgaagaagtgcttgagataaactgcttcttgttctgtaatggctgtcaaattaacttgttggttcacttgtacaagccgtttgaaatacaattcaaactgatccatttgtgcttgtgaaacttgaatattgtatgtttttaacgttgctgcaaaacccgctggtgtcattatttctccttaactatgctttaaagtaggcgtttaattcgtggaacattattgtttcacatataccttttagtttaacgtacttaccctaaaaaaacaagattcttcccagttttcagattatcgtttcatgtgaaacataataatcggtaatttaagaacaattatcgcctttttcaagcgaatcattcagtaagaaagcacttttgtcatcgaacagttggtgtgcatcatcacaaaggcgaactatcgcgattatttaagaatgttatattcgttttttacttaatttctaattgaagtcactattggcgtgtgctaaactaaatgttaactaaattttaacaattatcttggagggacactcgtggcagatatacactcaaattcagcacagccaattaatccaaatgaaaagcttccccacattaaagcagcgattctcggcttacaacatcttctagcaatgtattctggcgatgttttaattccattacttgtcggggctgcattacattttaatgccgctcaaatgacttacctcgtttcagtcgatattttcatgtgcggggttgcgaccctattacaattaaaacgaaccccactgaccgggattgcattaccggttgtcctaggttgtgctgttgagtacgttggcccgttagccgccatcggcactaacagccaactcggaattgacgttatgtacggtagtattattggcgccggaattttcatcttgttagtttctggcttgtttgcacgtttgcgttggctcttcccaccagttgtcacagggtctctcattacattaatcggattcacattgattcccgttgctttccaaaacttaggcggtggcgatgttgctgctaagtcgtttgggagtacaccaaacttaattaccggtttttcaacgattgccctaatcctgatttttagtatctgggggcgtggcttcatccaacaaatcgccattttaattgggattattgctgggaccttaatcgcagctgcgattgggattgtgtccttagatccagtaggtcaagcaagttggttcaaattacctgaattattctacttcggaacacctcgttttgaatggtcatcaatcgtttcaatgtcattggctgcgttaacgaccatgattgaatcaatcggtgtcttcttcgcccttggtgaaatcgttgggcgcgacattactagcaatgatcttaagcggggcttccgcgctgaagggattgccgctatcttagggggattgttcaacaccttcccttactcaacgttctcacaaaatgttgggattgttcaattatccggtatcaaaacgaaaaaaccagtttactactcagcattcttcttaatcatcttaggattattacctaagattggggccgttgcaaccattattccaagcgctgttttagggggcgcgatggtcgttatgttcggcactgttgggattcaaggcattaagatgttacacaaagtcgatcttgatgataaccgcaacttactagtcgctgccgtttcaatcggcttaggcttaggggtagcaattcatccaaccttgctccaatcactaccaacgagtgttcgcacaattctaggcaacggcttagtagtcggcagtctcagcgctgtcatcttaaacttactattcaactatcgttcattaattgcagcaaaacatgctgaacaaaaataaatcaaaaaaagtgcctacaaatttaaccgtttgtgggcactttttttgtctattcaatttcagttgtccgaatacttctagcaagtctatttgtcatttcaaacagctgcattaattctggcatgctaattttcttatctgattcagtaatacttttaatgtaagttccacacgcctgctcaaatcgacgataaattgattctccagcgggagaaactgctatatcaacaattcgacgatcatcctgtttgccatattgtttgctgatatacccctgatcctctaatttacgtaatttatttgaagatgctgcggtagatgtttttaatacttgtgcaatcttactattattaatacctttatagcgttttaatgtttgtaaaatacgaatttgttcgatggtaactccgtcttcatttaaaacttgactaatgtttgctgaaatttgagccatctcatgatagaaattaatcaactctaatttatcagtcgattgcgctatagaattcatcattcctcctccgtttcattcataatcctttgataaaactggtgccatcggctaaaatactgttgcaatgagaaacagtcgttaatcgtttgccgggcatttcgtgaatatgtttcacgtcgcatctgactacctagaaaatcactgagttgttgaactaagccagcgtcatctcctggtgtcaccaaatccccgttcacatgattctcaattacttgtggaatgtccccgacattcgtagctaaattgggaattccataagccatcgtttctaaaattgccattggtaagccttcttgatatgtgggcaataggtgtaacaggctttcttgaataacggtattgcgatccgccaaagctaaccagccaccaaggcgcacattggttaactttaggcggtctatttcttgctggaccttcccctgttcaccatcaccatacaacgtaaattgaatatccggaaaacgggattgaatcacccctgctaattttagaatatcgtaggtgcccttacgttcgcctaagtgccccagtgtgataatttgtttagactgactatggtatttgtattgcttaggtagttcaaccgcattagcaataatcgtaatcggtgtttgcgtaagtgtttggtaaaaagttgcccattcagtgcttaacacaacaatgccatccatagccacggaaaacaatgttaatattaattgaaattcactatagattcgcattatattaactatttttggatataaataaatttttaaatatctttagaatattctcataaaactaaagtaacgatgttatcattctatttctccctcccattattgtcatctaattaacgaatatcagttaatatgcccatcaaaaaaaccatcataattaaagtttttgctttaattatgatggtttttttaagtatttcatttacgataatattcactatttattaaaaatagtcattactattggtccgcatacgaaattgatgagaacttattaaacgttttgacaaataataatttgactgtccctcgtgcacccgcacggtttttttcgataatcacttcaacttctccaacgtccgcatcatctgactgctgtggcgctggtgctggcggattgccaccaccgaaatcatcgccatcttccccaggttcatcgcgatagtaatcatcacgatataagaaagcaacgatatcagcatcttgttcgattgatcctgattcacgaatatctgaaaggactgggcgtttatcttgtcgttgttcaaccccacgagagagttgagagagcgcaatgaccggtacccgtaattctttagccaatttctttaattgacgtgaaatcgccgagacttcttgttgccggttttcttggccggaaccttcaattagttgcaagtaatcaatgacgattaagccaacgccccctttttccttcactaagcgccgacatttcgcccgaatttccgccattttcacgccgggcgtatcatcaatatagatattcgcttttgaaaggctccccatggctacgattagattctgccattcaagttcgtcgagttgcccggttcttagatggttggcgtcaatacttccttctgcacacaacatccggttaacgagttgttcagcacccatttccaaactaaaaattgcaatattctcattggttttcgtcccgatattctgagcaatgtttaagacaaacgcggttttccccaccccgggccgggccgctaaaataatgagttcatcttcatgcaaacccgcagtaatcttatctaaatcgcggtatcccgttgatagacccgtaatgtcttcttcattttgatataacttatcaatttgttcaattgaactcgttaagacatctgaaattgatttgaacccggccttattttgccgttcggaaacatccatgatttccttttcagcggtatctaaaatatccgtgacgtcttcatcttgcgcgtaaccctttgccacaatattttgagcggtttggattaaacggcgcagcattgctttttcagagacaatcttggcataataaactacgttggctgccgttggtacagcctcagccaactcagctaaataaccaataccaccgatatcttccaattggttctgcgcatcgagggcactctttaaagtcaccgcatcgattccttcaccccgttcgtttaattcaaccatcgtctcgaagatcaaacggtgggctttacgataaaaatcgtcggcagtaacgtattccattgcttcaacgagcgcatcgccactaataaagacggcccctaaaacggcctgttccgcctcattattctgcggcggtacttgttcaattagttcattattcaccatttttactcctttggttaatcgacttcaattactcactagtttactcaaaataccagtgactggcaacagtcaccgattggtcagcaataaaaaaagccgtgatagtggtgctaatcacggtcttttcaatcattcattttattattcggttacgatatgcacacgaatcgtagctgttacatcagggtgaatccgtacatcaacattccggtaacccaacgctttgattggttctggtaaatcaattttccgtttatcaacattgatctgatattgttgagccaatgcttgggcaatttgcttgcttggaattgaaccaaataagcggctgtcttcgcccgctttagatttgatttcaacgattgttttatcgtcttcaattttggcttttaaaacctttgcttccgctaattcagcagctgcatttttagcttcagcatgttgttggccttttaaagcactgatagcagctgatgttgcgggttttgctttcccatttttaattaaaaagttttgtgcgtaaccatctggcacatctttcacttggccttttttacctttaccgcgtacatcttctaagaaaataactttcattgttctgaccaccttatctaattaatcgtttgttgcttccttgtccgtttccggatcaaatagctctgccaaaaccgttaataacttcgccttggcttcggaaacagtcgtatctgccatctgcgttgccgcattggaaagatgaccaccgccacctaatttctccataatcacttgcacattcacatcacctagactccgcgctgaaatggcaatcatgccatctgggcgtttcacaatgacaaacgaggcttcaatgtctgacaatgacagcaaggtatccgctgcttgtgctgcgatgaccggatcgtaggtacggttgtcctcacccatacataatgccatatttggctcaaccatttcaatggtttcaattaaatgattcttttgaatataattatcgacattttcttttaacaagtgttgaaccatcgaagcatcagccccaactgaacgtaaataactagctgcgtcaaacgttcgcgtcccagttcgcattgaaaatgactgcgtatcaaccgtaatcccagccaacatcgttgtggcttcgaacttgttaatattagcgacattttgtggttgatattcaaacatttccgtcactaactcacacgttgaagaggcgtagggctcgatataaaccaacattgggttttctgggaactcttccccacgacgatggtgatcgatgacaatcgtccgctgagcaagcttctcgtacaacttaggcgccattgttatggatggtttagaatgatcgaccatcactaataaactattggccgttgctttttcgagcgcttcttcaggcgacaacacttccactgcaatttcagggtaggctttaacttcctctaaaagacgttgaatatctgtatgaatattgttttggtcaacgaccacgtagcacttcttaccgttcatctcggcaatccggcgaatcccaaatgaggcgcccaatgcatccatatctggccgaatatggcccgtaacaaagacttcgtcaacttgtttgaagatttcttgtaaggcttgtgaaatcatccgtgcacgaacccgcgtccgtttttccatcggattagtcttaccaccataaaaacgtgcttgtccttcactcgctttgacaacgacttggtcaccaccacgaccgagggcaagatccaaattgctctgtgaagttgttgctagaacggctaaatcggattccccataagcaaacccaacactcaacgttagtgggaagttttgtttggatgtttcttctcgaatttcatctaaaatcttaaacttctcttgttcagcggcgtgtaatgatttggcgtacgccaaaacaaagaaatgatcatcatcaactcgcttcaagaacatctgaaactgattcgcccagcgtgataactcgttggtgacatagttattcagattagaaacagattgatcatccattgtctgagtgatttcatcataattatctaagaacacttgcccgatggctacttgctcatcttcataacgatcttcaatggccgcatagcgtgtaatatcgagaagataaaccaccccaatgctttcttggataatgatttggaattgattatcgccccaacgaacaatttttgtttcattagcatcttcattttgtgcgactaattctgccaactctggatcgacagacttaatctttttgcctaaaacttctttattaccgaaatattgctgtaaataaggattcgtccattgaatctcacctgattcgttgtacaataaaatcccaattggcatcttaattaaagcctcttgctcgccgcgcttaatgcggtacgacaagtccgagacatacttggctgtattctcagtgaccgtttcgatcgcgtatagcacagtaatgaccgtcccgattagcagcacgaataaaattagagcaattagccaatctaacatcgcagcaaataccaaactaaccgctgtaaggcccaacaaaatcagggcaacggtccgcaggcgagtatcatctaaaaactgtggtaattttaattgtttaaacttatttttcatgtaaactccttaattctagatcccattctgattcttgttcatctatcattgagtctatgtggttctttactaaaacttaaaaaatgctacttttattttagcacaattgccctacaattaccgctttgaacccgtaatttaatcccatgttcccctattaaagcgcacaaaaaaagacctgctaaacagtgtttagcaggtcttttggttgactgattagtcttctgtaacgaatggtaataagcccataatccgtgcgcgtttgattgcaattgtcaaacgacgttggtttttagcacttgtaccagatacccgacgaggtaaaatcttaccgcgttctgagataaaacgtttcaataaatcagtgtctttgtagtcgatatattcgatgtggttagcagcgatgaaatcgaccttacgacgacgacggttgccgcctcttctttgttgagccattgaaagttcctccttccaaaacagtttattttagaaaggtaaatcatcatctgaaatatcaattgcttgaccattatttgcaaatggatcggcttgagtgttatttgcagctgatggattacccgattgttgagggctggtaaatccagattgttggctaccattgctttgattgttgttaaagttttggcttgcgccatccccttgccgttgctccgttgttgtccgtgattctaacaatgagaagttatcaacgaccacttcggttacgtatacacgttgaccttgttggttttcataatttctcgtttgtagacggccatcaactccgactagtgagcctttcttagtgaaattagcgaaattttccgctgatttacgccagatgacacagttgataaagtctgcttcacgatcaccattggcattcgtgaattgacggttcactgcgattgagaaagtcccaacagcagcaccactagaagtgtaacgtaagtcaacatcgcgtgttagccgaccaacgagtacaactcgattaatcattctgtcagctcccctctattcaataattacaattcaaaattagtcttcgcgtttaacgatcatatggcgtaatactgagccatcaatcttagctagacgatcaaattcgtttaaagcttcatcattatcagctaaaacatttacgatatggtaaatgccttcgtgttgattgttgatttcataagctaaacgacgttttgaccagtcttttgaatcaatcacttcagcgccgttgtcttttaagatgccgtcgtaacggttgacaagagctgttttactttcttcatcaagtgttgttgagatgatgtaagtaacttcatattttgattgagccatgactgttcacctccttatggactttaggttcttacctgtgtaagaacaaggagtaactgactaataaaaattagcctcacgatttagaccctgtgtctaaatcacagatactcacaagataaaattctatcataacggccgttaaaatacaatctaaaataaaaattgttgctgctaacacgcttggtaacagttgttacaagtgtatttacgcagaaacgatttttatttttttaattggcagattgtaaaatttaagttgaacatttaagtggacagaaaaacccatcaaggtctttaatggtgttaccacacaatccattagaaagaaggaccttgatgagcaccactattttatcattccagaaccgtgttgtcattgaaacgcttcataatgaaggacgttccttgcgatacatcgctaactacttaggctttagtaagaccaccatctttaacgaacttcaccggctaaatagtgagtaccaggctgggctagcgcaaactgactttgaacgaaaggttagtcaacgggggcggaagtcttcgctcactaaaaaccttaaacacttgatcgaggaaaagattcaagtccagaagtggtcccctgaacaagttgcccatgtggtggggattgcctacaagacggtctataactggattgatcaaggatggcttgatatacagttgcccgatttgcctgatcatggaattcgtcgtcatcgtgctaaagaaaagcgtggtacgttcaatcacggccgctccattgaggagcggcctcataaagtcgaaactcgccaggaattcggccactttgaagctgataccgtactttctggtaaacgtaaaggtcaagctgtggctacttttgtggagcgtaagagtcgcctgacaattgttaaacggctccatggtcgcgacagtcagtccatgactcaagccgtacttgaactagctagtcaacttcaagacaagctcaagacgcttaccgtagatcatggtaaagagttcgctaactatcagacaattgaacggcgaactggtacacaggtttattttgcccatgcctattcaccgcatgaaagaggcagtaatgagaaccgtaaccgagttttgcggcgctttattcccaaaggccaagccattgaagaactaagtgatcaccaattggttcaaattaattggtatttgaattcacggccacttaaatgtcttaattggcatacaccaatcgagatcttcttgcttaatttacgtcattaaattcgttcaagttatttcttgcaatctgccaatttaattaattttctgaatcttgatcatctgatgccgattgatcggcttcagcccgcgcgagtaattcatcgacttgtgctaagccagtatcagtagtgtcatcagttggtgctattggtgccgtcgttgcttctggtgtttcaggttcatctggttcagcttcgactttcgccattgttgcgaccttcgcttcgtcatccacccggattaaacgcacaccaagtgtggcccggccagtttgtgaaacgttagcgaccttgaaacgaatcaagacgccagtatcagtgattaagagaatatcctcttctccagtgacggcagcaatcccagctaatgggccgttcttttcagtgatgttggcagtcttaatccctttcccaccacgacccttgattgggtaatctgcaaccggtgtccgtttgccgtaccctttttcagagataacaaggatttcttgacccggaatcagtaagtcagagccaaccacatagtcgccttcacgtaaccgaatcccacgcacaccagcagcggttctccccatcgaacggacagctgtctcactaaatgacacagcataaccattatgggtcccgataaagatattttgttgcccatcagtcatcaagacgttacttaattcatcctcttcccgcaaggtcaatgctttcaacccattgctacggatattggcgaattcagaaacggatgtccgtttgaccgtccctaagcgggtaataaagaagagtgattgttcgtcttgcacttctttaccaacattaaccacggtctgaacgcgttcatcagaattaatgcctaataagttaatgattggaattcccttagcagtccgcccatattctggaatttcataccctttggcacggtaaactttcccagtattggtgaagaataagagcacttcatgagtcgaagtcgaaagcaagtgttcgatgaagtcgtcatcatggacgcccatcccttgaatcccacgaccaccacgattttgaactttgaattcgctggctggtaatcgtttaatgtagccgttatgcgttaatgcaatcacaacgtcttcttcttcgattaagtcttcgtcttcaagactaagcacttcacccaccaataattctgtccggcgtttgtcaccgaatttactttggagttcaagcaattcatcgtagataatcttcttaatgcgttctggtttggctaaaatatctttcaaatcagcaattaaagtcatcaaattattgtattcattttcgactttatcacgttccaaaccggttaatcgaactaaacgcatatccaagatggcttgcgcttgtttatccgataaatcataacgatccatcaacaagaccttagcggcatcacctgtattcgaaccacgaatgatctgaataatcgcatcgatatggtctaaagcaatgcgtaacccagctaaaatgtgcgcccgcgcttcggccttcttcaaatcaaattcagtccgccgacgaatgacttcttcttggtgcactaagtagtgttccaagattgatttcaaactcaagactttaggggcaccattcacgatggccaccatattaaatgagaatgaggtttgtaatggtgtcaatttgtacaggttattcaagacaactgaagcactcatatcccgacgcacatcgattacgatgcgcatcccatcacgatcagattcatcgtttaaatcggtaatcccttcaagccgtttgtcacgggctaattcagcaatccgttcgaccaacttggccttattaaccatgtatggaatttcagtgacaataatccgttctttgccgttcttttggacctcaacgtccactttagcgcgaagggtgattgtccctttaccagattcatacgcatggcgaataccagatttacccatcactaacccaccagttggaaaatcagggccaggtaaggcatccatcaaatcagcggttgtcgcatctggattatccatcaagatgtgtaatgcgctaatcacttcggctaaattatgcggtggaatattggttgtcatcccaacggcaatcccagtcgccccgttgacgagtaggttcgggaaacgggctggtaaaacagcgggttcgcgttctgactcatcataattcggtacataatcaattgtattcttattgatatcacgtaacatttcgacagccatcttgctcatccgagcttcggtgtaccgcattgcggcagcaccatcaccatcgacagagccgaaattcccatgaccatccactaacatgtaacgataactaaaatcttgtgccatccgcaccattgcttcataaatcgctgaatcaccatgtggatggtacttccccataacatccccaacaattctggcagatttcttgtaaggcttttcgggagtgacccctaattcattcattccgtataaaattcgacgttgaacaggttttaacccatcacgaacgtctggtaaggcacgcgcaacaatgacactcattgcatattccaggaatgatttacgcattgtcttagataaattgacgttttcaatccgaccgtcttggccaatttcgtttgccattaatctataaacccctctcagtcagtctttcaatgtgtccgtttaagcggcgaacacgctatgcatcgatgctctttggatccatgtaaacggcattttcttcaatgaaaatccgacgaggttcaacccgatcgcccattaacatttcaaaaatttgatccgcttcttcggcatcttcaacgttaacccgcaacatgcgccggttttcaggatccatggttgtttcccataattggctagcatccatttcccctaaccctttgtaacgttgcacttcaggtttaggacttggttggagcgtccctaacacttcttgtaattcttcatcagaatcaatatagcgcatcatcttcccttgtttaacacggtacaaaggtggttgtgcgatatacacgtaacccgcttcgacgattggtcgcatgtaacggtagaacaacgttaaaagcaacgtccgaatatgcgcaccatcgacatcggcatcggtcatgatgatcaacttatgataacgggctttagccacatcgaattcttggccaaaaccagtgcccattgctgtaaataaggtccggatttcatcattcgccaaaattttttccatgctagctttttcaacattcaggattttcccccgaattggcaagatggcttgcgttaaacgtgaacggcctgattttgctgaacccccagcggaatccccttcgacgatgaataattctgaaatagcaggatctttactactattatcggccaacttacctggcaagtttgagatttcaagaccgttcttcttccgtgtcacttcacgagcgcgtttagcagctaaccgggctttggcagccaatgagcctttgtcgacaatttggcgggcaatcgatgggttttccatcaagaacttcgtgaaatgatcagagaacatccgatcagtcaccgtccgtgcgtcggcattgcctaatttcgtcttcgtttgaccttcaaattgaggatccggatgtttaaccgagacaaccgctgttaagccttcacgcacatcttccccagaaaggttcgtgtcgttggcttttaagatgttttgcttggttgcgtagtcattaataacccgcgtgagcgccgtcttaaagccagattcatgagtcccaccttcgtaggtatgaatgttattggcaaaggtcatcaagttcgtccgataatcattcgtatattgcaaagcaacttccacggtaatcccgttttgttcaccttcaacatagattggttcgtctaaaagggtctcttttttgtcgtctaaatattcaacgtaactcttaatcccaccttcatagtggaattcaagtttttcatgtgtttcagcccgtttgtcggtgaacgttaacttcaagcctttgtttaagaaggccaattcccgaatccgcgttgttaaaattttatcatcatacaccgttgtttcagtaaagatatcagcatcagggacaaaatgaactttcgtaccatgttcatgggctggtgcgtcaccaatcatcttcattggcgtttgcactttcccccgcttgaaatcgatgtagtagcgtttaccgccttgagtaacaaccgcatctaattccgttgacaaggcattaacgaccgaagccccaacaccatgcaacccaccagatactttgtatccgccgccgccgaattttccaccggcatgcaagattgtaaagacggtttcgagcgcagacttaccagtcttagcttgaatcccaactggaatcccacgcccatcatctgtaactgtaatactattatcgggttcaacaaccacgttgatttctgttgcaaaaccagcgagtgcttcatcaatcccattatcaataatttcccaaaccaaatgatgcaacccttgggaactcgttgtcccaatgtacatccctggtcgtttacgaacggcttctaggccttctaacacctgaatttgactggcatcataagatttagcgcgttcttcttttgcttccatttgtgcttctgtctcttgattcatttgatcatctgccaagaaaaaaacctccgtttgatcgttttttgactaatttgctgctgcatcggccactgtcacggtgccgtttatcacggtaaacacccgtggcgcactaataatttcttttttgacattttcaagactagttgtcgttaagaacgtctgcaccttattctggaacgttttcaataagtgtgtttggcgtaaatcgtcaagctcggacaacacatcgtccagtaataggacgggatattcaccggtttgttccttcattaggtcaatttccgccaatttaacacttaacgcggttgtgcgctgttggccttgagagccaaacgattgcacgtccttaccgttaaccaaaaataacacgtcgtcgcggtgcgggccaaccaatgtcgtgccctgttcgacttcccgtgtttggtgcgactcgtatagggtttgaaactgttggtataaaccttcggcatcaagtaccaactgctcatctggaatctgactttggtatttaaacgtcaaaacttcccgctctttggtaatctcttgatgcaacttctgcgcccacttctccatctgttgcagaaattcacggcgagcaaccgtgacttccgcgccataagcggctaactggtcggacaatacgcctaaatacactaaatctttagcttgacgtcgttgtagttgcttcaaatactgattccgctgtttcaaaatcgacttgtattgcgaaatgttatacaggtacttcgcactcatttgaccgaattccatatcgataaagcgtcgtcggacagctggcgagcctttcacgatattcaaatcctccggtgcaaacaagacgacattcaattgaccgatatattgggataacttagcctgttctaaatgattgaccttcgcttttttacctttttgactgaccaccaattctaatggtgtgtggccagtttgccgttgtaccaagccggtaatctttgcgaattcgccatcccattgtatcagttcacgatcattattcgtccgatgcgaacgagccaaagccaacacatagatggcttctagcaagttcgttttgccctgcgcattttcaccaatcaagacattgatatctggcgagaaatggacgtccacttgctcgtaattccgataatgatcaagttggagttcacttaaatacatagtcgcctacaatctttcttgttgtttaatgacaaactggccgttatcgggcacctcaacgacgtcttccagatataacttccggccgcgacgatcatcaggttctccgttcactaaaaccgttgtttcttttaaaaaccattttgcttgcccacctgtttcaatcacaccggcctctttaaggagttgcccgagtgtcacaaactcagcttcaagtttaatttcttgtgccatactcaacccaccattcttaacgatattaattactgcgctaataccgatctgttataccttacaattatagactttttttgccttaaaaacaaataaacacagctaaaatgctttctgagcgtttttaagtgctttaaccttatcctacttgttttatccgaaatcgctgtaaacgaatttattttaattttagcgcaaaaaaaacgccccatttttaaatgcggcgttttttgattattaaaatgtccgaactggtgtgattaattgaatgtagtgttcttgatcttcacttgggaccaatgtaaatggccgtaaagctgccgtaaagttaatcacgatggttgtttgaccaaatgaacgtaaagcatccttcatataatctgggttaaatgaaatttcgagatcttcgcccgttaggttttcaaattgaagggcttcttcaacattcccaacgtccggtgagttcccgtagatgattgccgtgttgtccgttgtattcaatgtcaaccggacaacattgttccgactttcatgagacaacaatgatgcccgttcaatcgcagctaataagaccggtgcattgaattcgatttgtgtacttgaagaagttggaattaaacgtgctgtgtcagggtaatttccttctaacaaccgagaataaaaggctaagttaccggctttaaagagcacttggttttcagcaatccgaatttcaacggtttcaacttcgtctgctaacgttcttgaaagttcaattaaactcttcccaggaataatgacatcgtagttcccatcacttggtactgaaacggttaattttcgttgtgcaagtcgatgactgtccgttgcgacggctaacatttcgccatcttttaaaaccaaatgaacccccgttaagattgggcgactttcttggttagaaacagcgatgacggtttgatgaattaattgtttaagcacatcagtactgatactgaacggattttgtcccgcaatttcaggtagatgtggataactattagcatctaagccattaattgtaaattctgatttacctgaacgaatggttgtttggaagttgtcaccaacagcaatcgtcatttgatcttcaggtaattttttaacgatttcactaaagaagcgggctggtaaaacaatggcacctgcttcttcaacgactaattgattcttttcatcattactagcaagggttgcttcaattgaaatatcagcatcactaccggttaaggttaagccttcttgcgaaagcactaatttaagccccgtcaaaataggaatcgttgttttagctgaaatggcacgttgaacatcattaagggttttgatgaacacgttgcggttaattgagaatttcatggatgttaaacctccgaaggaaaatagatatatatatattataaaagaattttaagtaatagtagtagggcctgtggaacctgtggataacatagaaaagcaaaagagtgtctagttttccacttgtggataagttgagaacaactcttaggataactttagcgtttatccacagcctatatttagccttttaaggtattcttcaaatctaagatggcatcttttagattttgatcactcgttaaagcttggctaattcgttcatgagcgtgcataactgttgtatgatctttaccgccaaattcttgtccaattttgggaagagaactgtcggtcatttcgcgggccaagtacatagcgatttgccgtgggagcacaatttctttaacgcgcttgcgcccttttaaatcagtgattgaaaggctgtagtacttagcgactacggattgaatcttagcaattgaaagttgactcgacttcccattgagtttcaagcctttaagggcatcggcggcaagactagttgtaatttcagcattttgcatggttgcataagcttgaacccgaaccagtgaaccttcaagttcacggacgttggaatcaatttgaccagcgatgtagctcaaagtatcttctgggatttcgaggcgttctgtgtcggctttgttccgtaaaatagcaattcgagtttccagatcaggcggcgtaatgtcgacggacaagccccatttaaaccgtgaaactaagcgttcttggagcttaggaatttcattaggtaaacgatcagatgttaagacaatttgctttttatcattgtagagatcattgaaggtatggaaaaactcttcctgagtcccttctttatccgcaaaaaattgaatatcatcgaccaataataaatcaacgtttcggtattcttggcggaatttttcttgattcttcgtttgaatcgaattgatgaagtcgttggcaaaagcttcactcgtcacatacttgacgtttgtgtcaggtttagagagtaacagctggtgaccgatagcttgcatcaaatgggttttacctaaaccaactccaccgtataaaaaaagtggattatataaaacaccgggttcttctgaaacaacgagtgctgcagcgtgggccatctgattgcctttcccagtcacaaacgtgtcgaacgtgtatttactatttaaatgcgtttcacgtaaaaaggttggggtttcagctttggtgaggctgcgttcttcagctggtttttcagcttgaagctgctcggcttcggtaggtaacagaaaaataggggtcaattcaatctctgcgaattcgtaggccccttcaacgaccttagtggccaagttactttcccaatactctttgtgtaaaggagaaggcacttcgatcagtatttcattggctctaaaagcaagcggtttggcggttttaatccaagcattaaaaccgacgggtgttaaatcattttggaattcttcccgcaaatagttccaaagttcctgaagatcaggcatgtagcgtgtcctcctcacgtaaaataaccactttattgaaaaaaagttcaataaagaaagactatctacattctagcattctaaaaaaaagttttccacaacaagaacaaaatccacaggaatgaattaaaaagttatccacttgaacacacgaccggggataacttttagtggggactgtggaaaacagaaaacaacaaacgattatcgcacttatccacaaaaaagtgtgtgtatctgatgcttgctattaaaaggttttatcaatttgtgcacagcttgaaaatagcttgtggataacatagtaacaccctgtgattttctggataaatcagcaagtaatctgtgcgtgacaaaaatcggacgattcggtataatcagttatccacaagaaagccaatgaattattttttgtggataagaatatttattctgtttttttatggaaagtgttttaacttctatagaaatatgctattatattttagtgaatgtcgtaggtggtatttatcacccgttgtttctcagatatgaaaacaatagacacagtcaattaggaggtgccagtataatgactacaaagagaactttccaaccaaagaaacgccataaagaacgtgttcatggtttcatgaaacgtatgaatactaagaacggtcgcaaggtacttgcaagacgccgtgctaaaggcagaaaagtattatctgcataggccactgatgcttcagtggttttttttattatcctcaattaattaaatgaaatgccggagtgaattatgagaaagtcgtaccgcgtcaaaaaagaacaggatttccaaacggtttttgaagcaggtcattcagttgccaaccgcaattttgtggtttatcaattagaaaaacctggtcaaaagcattttcgggtgggcctgtccgtaggtaaaaaagtgggtaacgcagtgatgcgtaatcaggttaagcgttacattcgccagagcttgttggagttgaagccagagttaccacagactgtcgactttttagtgatcgcaagacgtggcgctaaccaactaacaatggcggaaaccaaacagaatttaatgcacgtcttaaaactagcaaagctattaaaggaagaagcagattctgcttctgaataagtgagggattacagtgagttcaaaaaatcgcaaacggctattattagtggccagtctattcttgttcatgctaatcgcagcggggtgtagtacatcaccagttgatagtagcagtactggcttctgggatcattatgttatttataacttttcccgctttattttatggttagcagacatctttggtggcagttatggttgggcaattgtggccttcaccatcatcattcgggtgattatcttgccattaacttggtggcaaagtaagagcatgctcaaacaacaagaagttgcaccagaaattcaagcacttcaaaagaaatatgcttctaaagatgctgagacacaacagaagttacgcgaagaaacgcaaaagctatatgctgaagcgggcgtcaatccagttgtgggctgtttaccactagtggttcaaatgccagtgttgattgccttgtaccaagcaatctatcgaacagctgctttaaagagtgggacgttcttatggatgcaacttgggaaagctgatccttactttattatggctatcttggctgcgatctttacatttgcaacatcgtatctaacaatgatgtcgcaacccacgaagaatgctgcgtcatccgcaatgttgtgggtgatgccaatcatgatttttgtgatggccatgaacatcgcgtctgctgtttcaatttactgggtggtaacgaacgccttttcagtgggtcaaacaatggtgattcaaaatccatttaagattcgccgcgaacgcgaagccaaggaaaaagaaaagcgtgatcgtgaaaaagcacttgctaaagcacgtaagaaagcaactaagaaacgttaatttccaaaattaaaagaccaatcataatgaattttcattatgattggtcttttttagaataggtaataggcagcaagtacaagaggaattgcgatagcgcagacgacacaaacggcaccaataagtaacccgtttttatggcggttaatcgttgtttttctcagcaagaatcgggatccaaaaaataacagaatggtaaaaggatgaggggaacattctgagccaccccttcgacaggtggaaaggttagcattaaataatctaatagcaaataaaggagtgttgttaatataaaaagaaatagtttcaatggctaatcctccatagcgctagattaaaaaatagaaattcagatagataaattgttaaaattggttctaaaccgttttcttaattttatagtagcatcatgattggtaataatcgataactaatttcaagactaaaacatctaattgatgctggcggctttaatttattttgctgccgttgtactatctgttgatgctgcttcagtcaacttcactgttgatttcttcaattcaccattatgataatactgaatttcaaccgtactattcatatcgtaactgtaaagtgtcgtgtgtaaatcagcaacacttgtgacatccttgccacctaaaccaacaatgacgtcgtatttactaatccctgccttcttagcaactgagttggcattgactgatgcaacaactaccccactcttcacagaggttggtaatttcaagactgatgattgttgcgttgatgaaacattcgtcaaatcgatgacgctaatcccaagcgctggtcgaacaactttcccatttgcaaccaattggttaataattttgaccacttcgttacttggaatagcaaagcccatcccttcaaccgttgtgctcccgttagaagctaacttcattgaattgatcccgatgacttgtcctgcaaggttaactagcggaccacctgaattcccagggttaatcgctgtatcagtttgaataacggttgcttggccagtcgcttgaccggttgtttcatccgtcacatcaatcgtccgtttctttgctgaaataatcccttgggtaacagaagtagcatattctgagcctaaaggcgaaccaatcgcgagcactgattcaccaggtttaatgctgtcagaatcaccaaacgttgcggtcttcgtcactttggcactatcaatctttaaaacggctaaatcagaaacggcatccgttccgactaagctagcatcaatttttgtgccatcactaaggatgacttccaacttatctgagccagaaacaacgtgattgttcgtgacaatgtaggctttaccatctttcttttcgtagattaaacctgagccttcactcgattcttcaagctcactactactactttttttattggtactatccgcgccaaagagcgcactcaaatcgcctgaattatcttgttgtttttgcaagttaacaactgacacaaccgctttgttgaccttattaaaggcagttgttgtttgtgaagatgagttgactttgatattactaattttagtggcacctgctttagttggtacttggacagtgcttgagacagtgttacttcccatctttgaaccggcataaccagcaacgccaccaccgattagtgctgcgataacggcaacaacagccgttttcattaatcctgaattctgattcatactaattcacccaaactttctaataaattctgtttattgattatctctatcatagaatgtaaatttgaaaaaattatgaacaagttacgaatattaaattgtttttctaatccgcattttagcgaacttatttcgcaaaaacaactaaaatgtcttctattcagtctaattacacggcaaacaatggatcagcaactgccggatcagtatctagaatttcaaagtctgttcccaccccataatcatgttcctttaagatcgacgcaaccgtcaaatgggccagttccttcatgttattttcttgactcaagtggcctaggaaaacgcgtttagtctggttccccataaacgacatcaaagcggatgccccatcttcattcgataaatggccggtatcactgagaatccgttgtttcaatgaccaaggatactttcccatccgaagcatctctaaatcgtggttgcattccactaaataagcatccgcattttcaattgtcccacgcacttgatcagagacataacccgtatcggtcaggattgcaaaggcacggttattatgatggaattggtagaattgggcagcagccgcatcatgtgacaccccataactttcaatatctaaatcaccaactgacaaggtactacccatttcaaaaatgtgcttgtgttcagcaggcacttcaccaataatcgaagccatcgcatcccatgttggttgatttgcgtacacgtctattccgtatcgccgggccaaaacaccgacaccactactatgatcgcgatgctcatgggtcactaataaactgtccacatctttaagatcgcggccaatactatgcattaaatcttgcacacgtttcccactcattcctgcatcgactaacactttatgattaggtgtttcaatatacgttgtgttgccagaactactgcttgcgagcacgctgacttgcattgcgtctttttctaccatgttttgctctatccccttggtctctttctaaaacaactaaatttcactacggttcttcatcagcgcaccggtaaaggcgttaatccgcttaacgacgacactcttagaattcttattctcaatggccacttgccaagctggcacgtacaccgtactactattggcgtccaacaaagcactgtatccgagtttcacccacataatgcgtgagttattcggaatctcattatctgtatataaatcaatgaccgcgtcttgagcagtcaccttcgtactttctttttcacgcaaaacttgaatcttattcgtgtaagtttgcgtgtaatgactaatctgcccgtcttctaatgtaaaaatcaactgaccatgttcatccatgatctgcccgcctgggactttttgcacatatacgacttgttgatcactcgataatgcgtgtgaatagcggtagtcctccgcttgaatcacgttgtctggttccttcataaaggccgccacggctaagcgttggttcccttttttgtaagtcagtggtttatccaattcactcgtcagtgtcatgcgcgctttatcaaacgaaacagtttgaccggttagtttggcactcgccgtttctaataatgtctgatctttttgtcggctggctaaataataaccatccgttcggcgcttggagagtttcttcactgaaatttgatcgtcttttaaatccttcataatctggctagtctgtgaaccactagtaatcgccgtcgacgttattgtctgactgcctttcagcgaggcaaataaatagatatccagcgcaataaaaatggcgataaaaatcatttcaattctgcgaaaatccattcatctaactcccttcggttaattcagctttttgcgccatcaatgcggataagctacgccaaacccctttatactgtacaaagtaggttggatttaaatcaatcacttgttcgttactggtttctttggtccattcataaccgacttgcacgttttccacattttctagcaagaaaccattacttgtcaattgattcaaaacagactcggtacttggcaatgtgacttgcttgtcttcagcaggaacgggtacttgcaaactataatttgaaaaatcaatcttttggccagttggtaagaattgtactttcacgctcccaaagttagtctgataaaagactgggaatccttcaacgtaggtccgataagcagtcgaattcgttgctttatcataactatagaaacgcatccctgaaagggcgttacctgtctttgaaagcgcatcaaaactggcttcaaaactctttgttaatgtgcttggtgatttctcattttcatacttcacaaacgaaatttcaccggtatcatggttgatcgttaggcgtttatacaaattgctgtccgtcccatccgtataaatcgcactattgccttgttctttcgtatcaatattatccgtattttgttgattcaacagcgttgtgatgtaataattttcgggttgttgattaactaaataactataaggcaacaacgtttgatccgctgccacatagagtaatggcttgtgattcaacattttttcggtcactttcaaatgcacatcggcatttttaagcacctttttcacacgagcttgtgaaaaaacattgagtgtcgtttggtacacttgatgactttgatcattcatcaaccacaacttaggctgtgtgcccaacgtgattcgaatccgattgaatgtcacgttttgacctaaattattattctgataactgaagacctttttaaaaatagcgtacgaaatattatcaggatataaaagggtcaatgtatgatcctcactaattgcctggtaataatcgtcttcgcttagcttaacttgcttaaactgtgccgacttggcaagctttaaagtcgctttaaactgtggaatcaaactctcttttgagttataaatcaactgactctgattgtctgtccgccacaatagttgcgtcggcaagaagatatcaccgatttttcgttctgtcttacgacttgttgacttagtggtggtttgactgtccgtttggcgctcataatgcgcgttactggtccagattagccatgatagcccgatactgacgataatggcagcaatcagtataacgcgcattaaaaagttattaaatcgcatcccactcacctccatcagaatcaattggttcatatggcaacgaaatgtagaatgtcgagcctttaccttcttggctatcaacccaaacacgcccacgatgcgcttcgatcacttctttagaaattgccaagcctaaaccagtcccgccttgtttacgagaacgggccttatcaacccggtagaagcgatcaaagatcttaccaaggtctttccgtggaatccctaatccttgatcagagatgcttaaaatcacgtgacgatgtgtttccaataagcgacacgtaatcacgccaccatctggtgaatatttaatcgcattattcatgatattatcgatcacctgcataaatttatcggtatcaatttcaacccataaatcccgcttagtgaagtctcgtgtaatactgtacttcttattcggatcatctgttggcaatttgcccgtgctggttgtcagtttaggcaaatcatctttgtgctcttgatcccgcttgatcatcatatcaaaccgatccagtgcatacccaaagaactcgtttaaattaacatattcgagattcatctttgccgttccttgatccattcgtgacaaactcaatagatcgttgatcattcgaatcatccgatcagtttcttcttgggtcacctttaagaaattgggcgctagctctggatcttgccatgcgccatcattcagcgcttcaatatagctccgcacgcttgttaatggcgtccgcaattcgtgagacacattcgaaacgaattcgcgctgttcttgttcattcttttgttgttcggtgacgtcgtggagcacacaaactaaaccggtgatatagccggtttctttttgaattaatgaaaaatcaacatgcaagattaagtcgtgatcttgttgttctgagaaatccaagaccatttcctgttgcgtttctaatagatcgcgcaaagaatattcatcactgattcgtaaaactttaagcaatgactggcccagtaactcatcgcgtgtcacatttaaaaaatcttggccagtttcattgataatcgtgatattgcctcgtcgatcagtcgcaatgaccccatcagtcatatgactgagcacactatcaagtcgccgtcgttccgactctgacgcttcttgcgcctcttcaacccggactgataagttattgaccgcaatcgcgagttgccccagttcatcttgaccataaatcttaacttgcccagagtaatccccacgcgccatttgaatcgcttgtttcttcatttcatcaattggtcgggtaattgcccgggaaataacaatcgataatgccatccctaataaaccagcgactaaagacgaggttaagaaaatgacggtaatcgacgaaatccccttgtaaacatcttccatactagcccgaatataaacggcgcccacaacggtattactatccccacttgggttcgtcaacggttggatcgctgtataatagctccctagactctcattgtatgccacttcttgttcggtatgcccagagtaaataacctgtttcacccgtgggttacgcgtcttttgaccaacggtactttgattattcaagttcgtgacacctcgaatggtgcccttattatcgacaacttgaatttcggcagaattgcccatatcgccaataatctctttaatattcttgttcgcattaccactattattcagtaactcattactaagttggttttgaatataggatgtcacttgtaaggattgcttaaaatcacgcacattctgatattccagttgcttcacaaaagaagcgccgataacttccaacgttaccagcagcaacaatacgaacacaatggcaattttaaaatgaatcgattgtagcaaccgaattttcttattcatgcggcaaatttactcctgctcaggatttcttaagtagtaaccaacaccccggcgtgtcactaaccattctgggtggctggggttgtcttcaattttttcacgtaaacggcggaccgtcacatcgactgtccggacatcaccgaagtaatcatatccccaaaccgtttgtaacaagtgttcacgggtcatcacttggccgatatgcttggctaaataatgtaacaattcaaattcacgatgcgttaattcaatcttgtcgccccgttttgacacaatataagcatcaggatggatcgttaaatccccgatgttaatctcgtgattttcttcattcgcttctttatctgattgactcgttgtaccttgccggcgtaggttagccttaactcgcgccactaattctcgatttgagaatggtttcgtcacataatcatcggcaccgagttcgaggccaatcactttatcgatttcagaatctttagccgtcaccataataattggcatatcatgcgatttacgcacttggcgggctacttctagcccatcaatcttcggtaacatcagatctaatagaattaaatctgggacagcctcttcaacttgttgtaaggcttcttcaccatcataagccgtgtagacttcgtaaccctctttggttagattaaatttaacaatgtcagagatcggtttttcatcatcaacgactagtatttttttagccatgtgcggatcctccttgaatgtggatgctttgccttctattatactcattttcagaaggcaattcaaaattaggtcaattcctaccaactggattaacggcattgttaatccctataacgattaattcttacgcgctcagtaactttattcaaaaaaaatacaaataactgtttacaaaagtttgtttaatatgctatgatatttaagtcgtaaggcgagacatcatatgggtggttagctcagctggcagagcaacggactcttaatccgtgggtccagggttcgatcccctgaccacccatcaagtatacatgataagtcgttatagaagtgcttaggcattgatataacggcttttttatttcttcttagcagattattattcacagtgaatacgacaaaccgtattcaaacccgtattcacgtattcaacaaaaatcacgcacggggcatatacataacttactgcaggcggtcagattagtggccgttttttaatttggactaacttcattagccaacgatttaagttaaacatagactgttaaaaacatactagcaaccattagcattcatttttattaaatttatggtttccgtcgtaaatcgcgactgtattcattagataagggggtgcctccagttttggacagacgtttcaaacgggcccaagtttagcttggttgtatttttcgacctagataatatctaggggtaacgtttcgttactccatatgtttctatatcaaaacacatctgctcaagcttgagccaatttatatctaattgagtagcacggaattttccgctgtactcattttattttgacctaatagaacgatctgttatggcaggttatttcacggttcgacaaaccgccctattttagggcctcctttttctaaactaccgtttcggtacctcagattgcttccatgcaattagccgaaaccaaagatggattgggcaacatctcgttaaaatcaacggtatctaaagttaattagggccgaattttcggccgtactgtttctataattggctaagtatctgacgcaccatatcagtgcattagatgctgttgtaatatactaactcatctttaaggagtcatcaattcggtgactccttctttagggcctctaaaatctctaaataaattaatgttaggttttgttaggttttatgtccaacaaaagctaattcacgtaggtttacattggataaaccaataatggcttgtcctattcaattactaatccataaactagcctgcgaagttttgcgcaacctacttataaacaagcaactcctgattattatagctttcggcaaaagctaataacgccctattcttaaaccgattataactagacctgctataccccatcgtatccgctatatattgccttgttttatgactaccgtctaagtaacacatattaataatggatgcttgcgtatcctccattcctcctacaaccgcttgaatacactttaaatcacgcttagcctgctcatgtaagggatgactagtatttaccgtggctagccgtctaatcgtgccatagctctttaacagctttctggcgtttttgatacttgcttgttggtttattcggtcaatgatcatactgcttcactccttaagtattaattcaattttgatggcatcctaaatcaggactgcatccccgttatcaatgcttcttgaatattaataagccttcactagggtaggactcggcaaactctagcaaagcctgcttcttatgcttcttgaatgatgatgctgttatacctagttcaccgcagatataagccatggttaatttaccagcacttaaatactgcatctttggcaattccctgttaattaccgttaacttacttaaagccacgtctatgtattctagggtctgccgtgcctcgagtgttttaaccgcccgtttctcggttgtattatcactgctaaaagactttggcgcatgatcacaaataggactctttaaatgactagcactacctgcaatatgtttcactcaccaatatcgctttaataatctatctgcttgctgtctgctcttatcctcatcaatatcaaaaagaaacactctgacacctccaacatattaaaaagggatgcactattgccatgtactagcagtaacgcatccctttggttttccaatcaggtattaaactaatttagtcttgtctgttcgttcaatgaacaccaccttattattttgagttgtaacagttaagctcccataacttggtaactgatattctttgctttgctgttgatccgtaataataattttgaccatcatatcacctctaaatatcaatcccaaattcttcagttagttgatgatgtttagcgaattccttgccacggtcgggcgtaatcgtacccaagtgttctggtggcagatcttttagtagtcttcgaatagtagtggtcacactggctgagtttttcttagctgctttgtgcattattaagtatcttgaacaacggtcaaccattgtgaccacacaagatctgccagttttgccagctacagtatccagctcccagtagccaatctgagtccgcttattggcagactcaggtcgttcttggagtgtatgcgatataggaatcttcccgcgacgttcctcataaccttttttatggcgcgatttaccatgatgtctaagctttctgatcacccctctggcacctcgtgatgaaagcttctgatcaaataaaccggagtagatgccacgataaatcgtggtgtagctgatctgaaatgatgaggtctctaattttaagcgtgcggcaatttcttctggtgaccattgtagatccaagaataaatgccggattaattgaagcaattggtgatcagaaagtagcgaccggcgtccacaatgagatttttgagcttcgtagcgctcttgagcaacagaaggtgaatatgccgatctatttcgcgataactcacggctaactgtcgacgttgctcgaccaattgtttgggcaattgaagtcagtgaagcctgattattatgcatcaggaatatcgtttcgcgttcactcatggtaagatgtttgtatgggctcatgattatgtgctcccttcgatggttgtcttcgcaaacaccattttacagggattcatatcatgagtctcttttgttgcacttaaagtataaattcaaggcaataaaaaacgttcaccgcaagtgaacgtttttttgacttacctatttagtttgtgaaacggtgttgcgggcgctaacacgtttgaagacgtggacggcaacccctaaaacggtaccgactaaggcagggactaaccaagctaagccgtagttggcgaatggcaagtatgcctgttcgaagccagtcatcgctttaccgaagctactttggctgacgaccgctggaaaagcagttaccatgtcgaaaaaagcaggaacaacggtaaagagaacaacgaatttatacacgactgggtctttgtggaacagtggtgaagcgactgacaataaaatcaagaccattgatagtgggtataagaacatcaacattggcgttgaccaagcgatgatttgatttaaaccgatattagcggtcaagaatgatgccagagtagttagaactaaccaagtgcggtagctaactttgggaaaatgtttatgaaagtcttgggcaaaagccgcaactaaaccgatcgccgtggttaagcaagtgacggtgatcaaagtggctaagatggcctgaccagcgacgcccatataatgattgacaatttggtcaaaagcgatgccgccattagcggaaactttgagtttgcctaaggacatcgcgccaacgaagatcaaaccaacgtagatgacggcgatcattgccattgcgaagacgccggcacgggcagtgaccagtgcgacactgttagcgcgttttttgcctaaggtgcgaacggcggtaactacggtgaccccgaaggctaagccagctaaggcgtccatcgtgttataaccttgcaagaaaccattgacgaaagagcctgatgtataagcagcggtggcgtgttgaacaccggcgtggcccattggtgaactaaaagctaagaagaaaacgccagctaataagactaagaaaactggatttaataacttaccgatattgttgacgattttattttcctctaatgagaaaaagagggctaagccgaagaaaacagcggagaaaactaataaaccaactgtttggaaattctttggtactagtggcgctaagccaaccgtgtaggaaacggtggctgtccgtggtgtaccaaaaagtgggccgatggtgccgtggatcaagatcatgaataagagcgcgaatacgggacctaaaggccgcccaacatcatagacaccttcggaacgagtgatactgattgctaaaacggataataatggcaataacacaccagtgactaagaagccaagcgcggcaggcacccaattctgtcccgctaactggcctaaatgtaatggaaaaatcaagttaccagcaccaaagaatagaccaaaaagcattgaactaaccacgaaataatcgcgtttagtgagtttacgttcctctaacataagcagcactccttaaattttgtaggtttgtggaaatgtggttcaaagactaagcgtctgttgccccacgtttaaatcatgagtgttgccattgctaagtcgactttagtaatggcggcgatcatcctgcgcgggaatgatcacgataaacaaaaaacgcccaaacctgaaaaattaatttcagataaggacgttaataaacgtgttaccaccttgatttgccattttctcacgaaaacagcctcttcgggtacaagcaccaattggtacgaaataccctagctcgataatgggagcccccaatgaacgctcaaacttcgcatccatcgctcaaagatgattttctaattgtcgcaccttgacgtccttgcaccaaacgacgctcgcttaactggtgaatacaattatacttttcttatcacagcgtttaattttctcattgatttataatgtttctataatttaacgcgattttaagtgtttgtcaagggggtgataaaaataaatttataatttaaggcagtagtccatattgaattaacgtgtcaatgctatctaatacgatggtcgtattatcaaaatgtggctgccattttaggatatcttgcgctttttgggtactcaactgacgattgacgtgcactaataaattgccttcgcgggcggtctggttgaacaaagcagcgctgcttaaaagcaagttcggcatcgttttagtgggaatgttttgggcaatttgcggtcgtttttggcgaatcagtgctgctatctctggtagtgatatctgaccagcagcactatccagaaaacgttgcccgccagcgtgaggtgcggtcagcacacgaatgtgtaagtcagcaacatcgcgcacatcgatcagattgagtgggatattgggaatcattttgggacgaccgttaagtaaatttttcaatagatcgaagctgccagaaacgtgggcgtctaatgctgggcccatgatcgccaccggattgatcgtagtcagttctaaactgccgtgactttgttcaataaactgccaggcagcctgttcggcgatcagtttgaatttttcataggccgataagcctttttcgttaggatcagtccaatcggcttcagtggtgatgctcgtttggtcgtgattactgaagccgatggcgccaaagttggcggtcatgacaacacgcttgacgtgggcctgttgggcggcctttaaaatgcgtaaaataccctctgtggcagttgtgtcgctgttcgggtcattggaaaaaacgggtgatgctacacttagcacgtagtcgatgttctgcatggctgtcgcccagccagcatcttgagtgagatcagcggcgacaaaacttaaattttcgcggtgttgcgcctgattttcttttagggcggtgcggacggtggtttgtttgtcgagttggcgtaaggtggcacggacgtgataaccttgatttaaaagttgtaagataatgtgcagacccagataaccgttgccgccggtaactaatacgttttttgtcatgatgttatgctcctattccctaatgagggttaatttaatcagtcatgtatgctatgccgttaagtagcatgatccttgtttatggcttctttttgtttataatagtccctagagtatactctagggcaagcaaaagaacactatttcaacgcagcgatttttaccgtagttgaatgatccgccgcgatgtacccaagggtctatccatggatattttgggtcctcatgatatccaagcagttgagtcaaagctaaacaatttaccgcgccggcaaactggctatcaaacacccaaagagcttttctccgctgcttccgccggttaagttaagtccataaaatatgaatattaatgaaaatactgatttaataggatttatcgtgtggctaatctgttcttgcaatttgggagtaaaattaatcattggtgctaaccactcctttacttagaacctaggttttatcaggttattaaccaaccccctatatattagggggccaagcgttcatatagcacgctcaacgcacatctcttttttttacataaaattccctaaatcggaaattcttatccaagttgataggcccgcgaaatgctacgttcggatatattaaacgtccaatttatttctttttcgttcttaatctgataaccagcgattaacatcgcgcctttcattgcaccatttaatacataaaagccaagtggtgtacgttcaaaaatatgtttaatctcgtatgatgaccgctgactgctaaaagttttaattggtttcaaggttgttagcacccaattaacgagtaccacttgttcatccgctgataattcattgaataatttaggcgcgttagtttcttcaaatttatctccaaccactcttagtaggtggcctcattccaatgattttcaaataaaaaacgtcatccaatagatgacgtttttatgtttatgcgtatagagccttttgattatatttaacatattgtttaccaaagctaacaaccattcctgatatcttcttagcgactggataaagcacaagcccaataatgaataatgccagacatgaaatcaattggaataccataaagcacactaagtgtttttaaaacatgaacgtttggtaatgttttatcttgctcccatctagaaaccgtttgacgtgtaacaaacaaattctgtgcaacttgttcctgcgtcaccccaacattcatcctagcttcctttaaagcattcccaactgacattttgccacctccgctataaacctaatttaacgaattaacccccacaaaaacaagcaacaaatctgttgcatccctgctattaaagcatttcaactcactggcagtcttttatttcccgggttaattcccgaaaacagctaacattttctttgttgccttttgggtcttcacgagttcaccttgaatacaccatctgcggaccgttttatcacaggtaatcagtgtcaccattttacgacctggtacatcatcgatgacttttacgtcgtatggactgattgaagctttgtaatcaactttgtacgtgtagactttttccatatccgttaagtagaccttatcgctgacgcgcacattttcaagtggcagaaagatgttttggaaagaatgccctgctaaagcataattgttaactgcacccatttgctgatcaggtctcattgtgcctctaccttgagccattgtgtcctctgagacgcctttcatgactggcaaggccatcttgacacttggaattgcaacttttcctaagacaatcacatcgcctttaatagcggcattcacaatctgttttgtatcgagtgaatcaaccttatcaaaatcaaagctcgcttttttatgttggtttttcttaatttgagcagctgtgacgtccatctgacgatgcgccatcattttaaccagttggttgcggattggattgatgaagaccaacactaatccaaccactaacagaatggctaataagccattaattaatcggtttcttgtctttttttgcataacagtttaagcccttcactagtatttacgactattgtaacacactattttatatttaccggctctaaatccttgtgattcgcaattaataacagcaacacataaaaacgcacaaccgaaactttcggctgtgcgtttgttgtttattttacgtttaagatgtacataaagaccacgaaaacaaagaataaaacatacataattggatgaatttctttgcgacgaccagctgtaatcattgtgattggatagacgataaagcccaatgcaatcccgtcagaaatactgtaagtcagtggcatgcctagaacgattaagaaggcaggaattgcaatttctaatttttcccagtcaattttcttcaatgattgagccattaaaacaccgacaatcactaatgcgggggccgtcacttgtgacgtgacaaccgtcaataatggtgagaagaataaactgaagacgaataacacacccgtcacaacggccgttaaaccagttcgaccaccaacagcaatcccagcggacgattcgacaaaggccccaactggtgatgttccgagtaatgacccagctaacatggccgttgaatctgataccaaagctttcccaacgcggggcatcttgttatctttcatgaagccggcttgttcagctaaaccgaccaatgtcccggcggtatcaaagaaggtcactaataagaaagtgagtacaacgacccacatttgaacggtgttgatatcgccaatgtgatttaaaccagctaagaaagtgggtttcaaacttggcgcagctgcaacaaagtgtgttggcaacttaattaggccactgatggctcccacaattgaggttagaagcatcccgataaagattgctcctggtactttacggaccattaaaataacggtaatgattaagccgaaaacagttaaccaagtcgtcccttgcgagaagtcccccaaaccaacaacggttgatttgttcgcaacaatcaagccaccaccgtgtaaaccgatgaaagccacaaacatcccgatcccagctgaaatcgctagtttcatattccgcggaatggcatcaataatgatttcccgtagcttaaagacagtaatcaacatgaagattaatgaagccacaaatacacccgctaaggccgtctgccatgacacacccatcccgataaccactgaataactgaaaaaggcattaatccctaaagctggtgcggttgcaattgggtatttagcatataaccccatcaagaaacacccgatcgcacttgctaatgctgtggctgcaaaaacagcccctttatccatccctgaatcacctaaaacgctcgggttaacgaataaaatataaaccattgaaataaatgtggtgaatcctgctaggatttcccgttgcactgttgaatgttgttcttcaatcccgaagaagcgacttactctttccataacgactcctctaaaccaactaattttcccactatctttttagtggtaatgtgtgtataatactgactggtgccaaacccatgagaatgaaagtttgttggcgtgtttaacgacacgtttagaaaacgaactttgcattctctttttttgtactctttttcagcaatacctaccagatagcagataagacatttgtttgttcacgatctggaccaacagcaaatgttgctaatggtaaatcaactaattcttgaattcgttcaacatagtgccgcgcattagctggcaagtcttctagcgtcttagcacccgtgatatcttcatcccaaccaggtaattcttcataaatcggtgtgcaacgttctaattcgcggagacttgctggataacgatcgatttgttcgccatctaattcgtaagcgacacagatcttcaatgttttaatcccagttaggacatccacacagtttaatgataattgggtcacacccgccactcgttttgaatgccgaagcacaactgagtcgaaccagccaacgcgtcttgggcgaccagtaacagtaccatattcatgaccggcttcacgaatgaagtcgccagtttcatcatctaactgagttgggaatgggccatcaccaacgcgtgaggtataagccttagccaccccaaccacttcgtcaatccgtgaagcaccaactcctgaacctgttgaaacgccgccggcagggtttgatgatgtcacaaatggatacgtaccttggtcgatatccaagaggatgccttgtgcgccttcaaataagacattccccttttgatccaaaacatcattcaaaacaactgaagtatcacaaacatattgtttaatttcttgaccatattgataatattctgcaaacattgtctcatattcaagtggttcagcaccgtagattttagtaaagagcgcatttttttcgtctaagttttgttttaatttagttgcaaagagttccttgtccaataaatcggcaatccgaatcccactccgagcggctttatccatataagctgggccaatcccacgattagtcgtcccaatcttttgatcacccttggctgcttcttgtaagccatccaatttagaatggtatggcaagataacgtgtgcccgatctgatactcttaattgactcacgttgatcccttgatccgttaaatatttcaattcagaaacgagggtcttcggatttacaacgaccccgttgccaatcacgctgagtttgtcactgttaaaaatcccagatggaattaattgtaaatggtaagttgtgtcacccaactgaatggtatgacctgcattgtcgccaccttgataacgcgcgatagcatcagcattttgacctaaaaagtcggtaatcttgcctttaccttcatcgccccactgtgttccaacaactactacagatgtcatataaacatactcctctattcgaatccgtcttcagatccgctatttaaaccctaaaactcacaaaaactattgtagcaacaaattatctcaaaatcaatataaaagacgaactttaaaatctctaatcagcctttattcagtaaaatcttaacgatacatataaccgataaaatacgaacgtaaataacgaacaatgatccctgttttgacaggcgttcattaaaaaaatacaatataaccacatctaacaccaaaggagctcatcatggtttacgtcagcaatatcattactgcggcaattgccttttcattcgtcgcaatcatcttaaccgttccactgttagtttaccactatcatcgttatggttcgctaaccatcctgcgtagtgtaattctctacagcttcatgttctacttggtagccgcttactgcttaattattcttcccctcccccacgctcggtggtcgctcatttaaccaccccgcgctataacttagttccctttacgtttgtccgggagtttatcaactcaacccatttcgtttggaccgaaccgagttcatacctcgcaacacttaaacaagcggcaaccattcagccgttgtttaacatctttttaaccgttccatttggcatttatttacgttacttctttaaaacgtctttcaaacagaccttattacttagttttacgttatccctattctttgaactcacgcaactttccggactgtatggtatttatcctcgcccttatcggttatttgatgttgatgacttattgctcaacatctctggcgggctgcttggattttatctccagcccttggtcacctttttcttacccactcgtgaaagtttggatcaagcagcctatgcgcgcggtcaaaaagtgggctacttccggcgcttattggcacttgccgttgattactgtgtgttaggcatcattacatttgcaattgctgttatctggcgattactaaaactacccaccattcattcagaaatgcttcagtactgcctggcaactggtgcttacttcttaatgctccccgttttttggcgtggcaaaacacctggtcaatctctcctgcaactacagattgtcgctgaccatcatcctcgttgggcgatcttctggcgccagctactcctatttttcatcgtcattcccagttttcaactctggcgcgtcaccctggatgccgctgttgctagtggccaacaacattttgacgtctatctctttattatcggtctctcactcttaccaccactgttattcaccggtaacttcttattaagttgggtgactaaacgaccacaattattctacgagaaactaacccatacacgggtcattagtagcattcaccccactcagcaaccttaaaaaagccttaaaatcatctttaattcctaaaaatagttaaaatcggatactttacggcttgaattggctatactaaaggtatcattcgctttgagaaaggattattgcttatgtttaataaattgaagttcctcatccccattgcatttactgctattatcggtctgagcgcacaaccggcctttgccgacagcaccacatcgtgggacaaacccgttgccactcttgggaccagcctttctagcacccaaaaagctgataccctcaagacactggaaaatgccgcgaatgtcacagatgtcagtgaactaacagtgaccggttccacacttgtaaaatatcttgatcaaaatcaacaaacatttaacgccaactcaagtgtctactcaagtgctttaattcaaaaaaatgacagcaataccggcatcaatgttaaaattatcgattttaatggccgtaacaacatcaccacaattacagccaaccaatataaaaatgcggccttaaccgccggcgtcacgaatgcgacaatttacgtgacttccgccattccaatcgatggctctggcgccttagctggcgtttacgccgctttcgctgaaaatggcgattcactcaaccaagcgcaagtaactgctgctcaagacgaaatgagcaccctcagcgatatcacacaggctaataaaggcaccgatggttattcagattcccaattgaataatgccgtcacaggtgccaaaaaagacatggcaagtaagggcaataatctgactgttaaccaaattactaccatcgtcaataatcaactcgaacaaaacaacctcaccaacatcatcaacaataatcaaaaacaacaaatcattaatgttctcgttaaaatccaagattccggtgctttaaattcggatgatttcaagaatcaagccggtaagttaatgaataatatccaaagtggtgcgaaaaacatcttcaataagctcaacacccaaagcaatcggaacttcattcaaaaactctttgatagcatggctaatttcttcaaaggattatttaactaaataacacaaaaaagccccgcaaacttcagtttgcggggctttttatttattcattatttcgttgttgcttttaaggcaactgcgtctgcagcaactgtggtactcattgcgttaaacttaatgtaatcaacagcgggcatgttggtaatgatcaccatcattgccgtcttcttaccagcagcagtaatttgattcaaatcaaccgttgctaataagtcgccatgtttgattgtttggccttcttcaacagcgactgcaaaaggtgcgccgtttaattcaaccgtatcaattcccatgtgcactaagacttctaaaccgttcgttgttttaatcccgattgcatgtttcgttgggaacacagtcataacagtcccatcaactggtgcaacaattttgccgtctgttggaatgacagcgtagccatcaccgagcattttttgagcaaaagttggatcatcaacattttcaatatcgatcaattcaccattagcaactgcatagaaaacatctgtttcacctgagttaatatcgctatcaacaggtgcttcaactggtgcggcagcttgttctggtgtacttgttgcgattggcgtattgtggttataaagttcttttaaagcatcagcaacaaattggacttctgtcccaataataatttgaatgtttgttttatctaaaacgttaatcccagcagtaccagcagctttaatcgctgattggttaacattggcagtgtcttctaattgtaatcgaagacgtgttgtacagttgtcaatcactttgatattgtctttgccaccgattgcagcgtagatccgttttgcttgaaccatgaatttatcatcagtagcgtctgtttcaacgccagcagtatcttcatcaacagcatcttctgcttcacgacctggtgtcatcaagttaaatttcttgatggcaaagttgaacccaaagtagtaaataactgccatgaccaacccttcaaccaataacatcaacggttggttagcaactgggtttttcaaacttaaaacataatcgactaatccagcactaaatgcgaaaccggctgtccagtggaagaaagcagcaacagccaatgaaatccctgtgaaagctgcatgcaatacataaagtggccatgcaacaaacatgaatgagaattcaagtggttctgtcacccctgtaaagaatgacgcaaaaccagcagctaacatcaatgaagctgttgctttacggcgttctggacgagcatttttgtagattgcgtaagccccagcaggtaagccgaacatcatgactgggaagaaaccagcttgatacatccctgtcttaccaatcacagctgaaccattcgcaagtgatttcgcaccacccaagaaattcccgatatcattaatgttagcaacatcaaaccagaacacagagttcaaggcatggtgtaatccggttggaattaataaacggttgaaaaagccgtatagaccggcaccaaaccaacccaatttagaaattgcttcaccaaatgacactaatactgtaaagacggctggccaaacaaagtacaagatagctgaaacaaccatcattgcagttgccgccataattggcactaaacgtttcccactaaagaatgagagggccattggcaacttcacgttgtggaagcgattatacattgcagccgcaattaagccggcaataatcccgattaaaacattcccttcaatcttaccaaaagctgggtttactttagcgatgtctgataaaccttgcatcgcttgaattgaagcaggtgccaagattgtcttaggcactaagaaagcgactaaaccagcaagtgcagctgcaccatcttgatccttagacatcccgagtgctaaaccaacggcgaataataatggcaagttatttaaaattgcaccgccaccggctgataagaaaattgtaaagacgtttgcgtttgaatcgccattgccaacccagttcgcaatccccattaaaattgcggctgctggtaaaacagcaactggcaacattaatgaacgacccattcgttgtaagtaattcttcataagtttttctccattcatttttttcgttaatatgattaaatcattaatgtaaacgataagcaagcgcttaacaatcggtatagacctttataaatagcggttgaagcggtttcatgcacacaaaaatattggtctatacctaaaagttaacaaatgatatctgattcaccaaataaaacggttgcattcacctaccacactctctataccgagggtacaaattaatcgctttgcactaggggtgttcttagaagaactgagataggtttgtacagcctgatccctttgaacctgtaagttcagacttgcgtaggaaagtgcctttctttagactactcacaccacttttctatgcattcgtgcatcgttaagtgattttttttagtttttaagggaggtttttatatggttgtttcactgttagaaaaagttagagcgctcaatccaatcgttgctaatgtcgcaaatggcgtcacaattgatcaggtcgccaacgcacaaaatacaatcggtgcctcaccaattatgtctaatgcaccagaagaagcggagggaattgttaccatcgcacaagccattacgattaatattggtagtttgtgggcaccacagattcaagaaatgatggccctaatgaccgccgcttatcaacaacaaaaacccgttgttcttgatccagtggcagttggctcactggcctaccgccagcaaattatcgagcaactattaatacttgacacaccaactctcattcgtggtaatgcaggtgaaattgcttatttttgctgggatagattggcaagcaaatggcatcgacgccgggcatggaaatagcgatccagtcattattgctaaggccgcggccaatcgtttacacaccataattttattaacgggtccgaccgacattattacagacggtcaacgcgttacgctgatttcaaatggtacctcactttttcaaacacatgttggttcaggtgatatgttatcgggtctctgtggtgcatttgttgcagttcatcctgcagatccctaccaagccgctatcgaagcagccgccacatttgccgttgccggcgaactagtagccacagcaatggaaacaccgctacctgggaccttctatccccaattaatcgattatttattccacattaccccagccaaagtagcaaataccgtccaactaagtgaggtgcctactcatgaatgaattcccacaagctctaaccatcgtcggttctgacagcggtggtggtgctggtatgcaagctgatattaaaactatccaagagcgccatgtttttgcaaccaatgtagttgtcgcgatcaccgctcagaatacgcttggcgttcaagccagtctgccactaccactatcactaatcaatcaacaattcgcttcattggctactgactttaaaattcgtgcctgcaaaacgggaatgttggcagatgctgaacatgttgcaacggtcgctgaaaatctacgccattatgattgggggccgctcacccttgatcctgtaatgattgccaagggcggtgcacagctacttgccgacgatgccatcgataccctacgtactgaattattgccgctagccacagtgctgacacccaacttacccgaaaccgaagttctcacgggcagccgcataaagacaacagctgatttcaaacaagcggcccaccaactccaacaaatgggcgccaagaatatcattatcaaaggggccatttagactatcaatcacaagccgccgattacgtcctctacgctgatggacaagatgaatggttaactacaccacgaattgctactaaacgaacacatggcactggagatacgttttcagcttgtttaaccgccgagctagctaagggcacccctttgaaagcagcaattcatattagcaaagcctttatccaagccgcaattgctaatccgattgctgttggtcacggccacggaccaaccaatcactgggcttatcaggaggttcatcatgactaacatttcccgggaaatgttccaaacttatttggtagcgggtacccaaaataccggtatggatgattttctaaacattctcgaacaagcactacaagccggcattacctgtttccaattccgtgaaaaaggtgctggtagtctgcaagattccgatgcgattttaaagtatgcgacagcggctcaagccctttgccgccattatcaagtcccatttattatcgatgacaatctcgatttagcacttcaaatcaatgcagatggtattcatgtcggccaaagcgatcacccgtggcataaaattgaaacggccaaagcacacggcttaataactggtctatcttgccacactgaacaagaacttcaccaaagtcataatcaaccgatacttgattacattggcattggtccaatttttccaaccaattccaaagaagatgctaaaccagcacttggcactaatcgcttgcgtttcttaacgcagcaaagtgaactaccggttgttgcgattggtggtatcaaccaagaaaacgttgctcaagtcgcaaagactaccgtggatggagttgccgttatctcagcaatcacccacgccacagatatcgctcaaaccgtccaagcattacaaaagccatggcaccgcagtactgatgaaaaccaatcgtaattaacccttattacggtttgacccattctgaatagtatttgctgccagtttgatccaccaaacatttaaaaaagccgctagaaccctttttatagagtactagcggctttttctcggtagtttgctgatatttagcttagtgctttgttagtgatgactactccatttaacactactcggtaaacttattcattagcaagggcttcaaaataacttgctttttgctgcgcccagtaggcctcttctgcctcatcaatcggccggagtacccgacatggattaccaactgcaatcacgttatcaggaatgtctttagtcacaactgatccagaaccaatcaccacattgttcccaattgtcacgcctggattaacaaccgtattgccaccaatccacacatcatccccgatggtgattggcttaccatattccagatcatcccggcgttcttgtgccgtcgttgggtgaccagctgtgtagagtcctacacgaggtccaaagaaaacgtggttcccaatcgtcactggtgctacatcaataatgatgcaatcgtaattcatatacacatgctcaccaatgcgtgtttggcaaccataatcagttctaaatggtggctcaatatataaatctgagccacttttcgcaaataaagacttggttaattcgcgtcggtaatcttgttgttcttcagtggtttgattaaacaaccgagtaagtacgcgcgcgtgtttcatatcggctcgcaattctgaatcgttcgcccgataaatttgaccattaatcatgcgttttttttctgacatttctttatcccccatcactactaaaataggtgcgtcacaattgtggcgcacctttttaatttaccaaattgcaacccgtttagcgggtgctaagtacatctgatcagctttcgttacattaaatgtctcgtaaaaggctgccaagttttggacctgaatattggcccgcaacgcgtttggtgcatgaacatcaatatttaacaataattgttgatattgctttgtagctttcatccgccaaatcgttgcccaattgacaaagaaggctgccaaatcaacatcaggttcttctttggctgcttcaagggcacaactcaagccacccgcatcggcaatgttttccgagacagttaatttcccgttaactgttgcgcctgcatattctaggccatcaaattctgcaatcatttcttccgaaagtgtcttgaagtgagctaaatctgattcttgccaccaattatgcatgttgccatactcgtcgaattgcgcaccgttattatcaaaagcatgtgagatttcatgtgcaatcactgcaccaatcccaccgtagttagcactgctactttgttctaaactgtaaaaaggtgcttgcaaaatagccgcgggaaagacaatgatattcttcgaaggtgaataataggcattaactgtggcagcgcccatttcccacttattacgatccaccggttgagtaagtttcgcaaaattttccgtttcaatcgttcgaataaagtcagctgtattttcaaataatgtcccatcttctgctttaggtactgtgaccaacttcgcaaaaataggggcaatctgatccgggtaaccgacatgaatcccaaggtggttgagttttacaatcgcttgttggcgtgttttttcggttagccagtcatttttttcaaggcgtttttgataaacaccaatcattttttggaccatcttttggacgtcggccttggctgcttcaccgaagtattgccgaccgtaataatcgccaacaacttgattgaacatccctaaggcaaggtagtaagcactcttttgttgtggacgagcttccttgctaccagataacgcacgactatagagcgaactaatttggcgtgcctcttcattcagataaccgctccaactacgaactgtcatgactaacagccacgctttgaacgtttcgaaattggcgtctgtcacaagctgactcagttgcgcaaaatacttcggttccgtcacgataattttttccggttgaacaggtagcaccttgctaaataaacgtggaaaatcaagcgtcgtttgttgttgcataaaatcactcaaaggctgtggattatagagtttcgtgtaatccgctgcttcttcggcactcttcacataaggtgccagtgaccgatcaaatgccaacgctaatttaaccgtcttcgttgcatcaacgggcgcaatcccaattttctgcaagagctgaaccatcatatccgtaaagacggccaataaatggtcagcattgggattgtcagcttcataataggtcttatctggcaaaattaagtcgctagcttccgcatacaacgcgtgatgggctgtgtctttcatgtcagcatcgacagataagccaaatggtgttggtaacccggaaagtacccaatcagctaacccacgattgtaagttgctaaactatcgagagattgcacccgggctaccattggtaggatcggtttcataccgagtacatcccgcgtttgaaagtccgcagctagttcgtaataatctagaaaatgttgtaacaatgcgttctttgcggtcgacatcttagcaaaatcagccattaattgctgatcaatctcatcaaccaaggcgacaaagccgcctgttgctggtttatccgctggaatttcagccgtttttaaccattcttgattcaccgccgtataaaaatcatcttgcattcgcacgtttgtcatcattgtcctcctcaaaagcagattctttcccaattttaacattttgccactttttccgttaatgctttgacccccataattgcaaaaaagccgcaatttagcggctatttcgttggtaattgtttttcaacttgataatttgaatcttggttaagtttaaacgtcttcttcaaaccgtttgatagatagattttattatcttttgtgatcatgatggcttggatattcttcggtttgttgttgatgagctgcatgccttcgacaatccccttattaaagacagcatttgaaagggcatctccatctactgatttaggcgagataattgtgacactcgctaggttattttcatatgggtagccagtatggcgatcaaagagataaatgtaagtatgcccgtctttttttagataatgttcataaatccctgccgtaacaaccgaaatatcacggcctttaatcgtaccgactgattctccacgcgcctttttcggatcttgaatgccgaccgtccatggtttgttcttccctaatggtgaatgccccataacaatcacattcccacctaaatcaataacggctgatgtcacaccattttccttaaaaacttgtttaacttgatcggcaatgtaccccttagcaatcccgccaaaatcaagtcgcatgccttttttcttaaggtaaactgtacgtttggccttattcaaaacaacgtcatgataatcgactaatggtaacgcttggtcaatttctgcttgtgctggcacccgcgcgcctggtaacccaatttgccataaatctgtgatcgcaccaatggccatatcaaacgcgccatccgattcttgactataatgtagcgctttttccattagtggccacatatctttgctaacctgtacaggtttaacaccggcattatcattaatcttatccaattcggaacctgatttggttaacgttgcttgattttcggactttttaatccgcgcaaaagccttatctagcacggcttccttgtctttattatagattcgcaatgtacaaatcgttccgagatagtaatcacttttttcatagggctttttgaccaacgtttctttgtccgctggcttactttgacagcctgccaataccagtgtcacccctaagagtgccaatccgaattttacccatcgtttttgcatcgttcaatcgctctccttgctactaaaatcacatggctctatcataccatcaatccgctttaattagttgtaaaaatcttctactggcgcgattctttgagttgctgataggtggcaattaatgctttaaaaacacctttatccgaataaactagaatattcatgcgatagataattaatgctaaataagtcagtccaattagtgtcgccatggctatgaagagtcccatgctagccccgaacgcgccaacatcaccgtttgccagccgcacaggtaacataatctgtgaaaacaatggcacatagctcaccgcccgcaataatggaatatcggtctgtgatgccagtacaaagccacccaaataacttaatgtgcccagtaaaatcaatggcgaaatggcttgttgtacctgatccattcgagacacaacagcgcctaacattgcagctaatacggtgtagagtaataccccaataattaaaaagactcctgcataccacattgctggcgcaaccaaagcacgacgaataatcggcaataactctgctaacggtagttgctgtttcaaaaactgaaacccgacaatcccaactaaaatatagacagtaatttgggtgagtaatagggctaatatcgcggcaatcttcgcgaaaaattgaatttcaatcgaaacacttgatagaatgatttccatgattcgcgaccctttttcagtcgcaatttcttgggcaatcattccagcataattcacgataaagatgaacattaagaccgtaattccaattgaaataatttggcccacttctttagtgttttcctgggaaatcttttcatgaccattctggtaattaaccgtcactggtgcaatgacagttggcgtcatcaatttctggatctgttcaggtgcaacgcctgcttgttgcgccaaagctactaaatgaatctgatttaactgattctctaagacactcgcatcaaatgatggactatcttttcgttcatagtagcgactgattgtctgtcctttttcctcactcaacaacaaatagccatcaattcgctctttctggagcgctttggtggcttgttcccgagtcgtaatctgctgatcgatttgatatgttttaccttttaactgctgtaattcactctgttctgctggttgcggcgccaaaacagcaattctaacgggttctttgctatgatccatcaagcgactcacaccaaacgtaatcccgagcatcacaattggcatcaaaatcatgattagatacgctgggcttttaatattctttagaaatacttgtttaaaaatcaccttaaacttaaacatggccttcctccactttcattctaaagatttcatcgagcgttggtgcttgttgactaaactctaggatatagccattttgtgtcgctaagtcgaaaatcgttttaccaaccgtttcgtctgccaaagttaattcaaaccgctgcccgtgctgtgttacacgtgaaacaccgttgatatttgctaaagtttcgcgtgctaacggtgcttctaagaataattgcgttcggccaaactgattccgaatttcatcgattgtaccggcgagcaccacttgcccatcgcgcaacatcacaattcggtcactaatccgcgcaacattcgtcatatcatgactcgaaaaaatgattgctgaaccttgttctttaagccataaaataccttcttctaaaagttctgcattcactggatcgagtccactaaagggttcatcaagaataatgagttccggttgatggatcaaagtcgcaatcaactgcactttttgttgatttccctttgaaagatccttgattttatcagtccgcttacctttcaccccaaagcgcaccaaccactcatcaatctgtggtttgatgtctgcgatgctgcgcccacgaagctgtgcaaagtacaaaatttgttgttccacggtcatctttggatacaatcctcgttcttctggcaaatagccaagttggtcataatccgcagcggtaaacgcgcgacctttccagagaatagttcccgtatctggtgccatgaaattcaagatcatccgaaaggtcgttgtctttccagctccattttgaccaattaagcctaatatttcgcccgacttaaccgtaaatgaaacatcgtcgaccgctagcatcgttccgaaacttttggataaatgtgataaagtcagcacgtccccaaccccctacttttcattaccttaactataccgtattcatttagaaagcgcattatctctcaatgaaatattaaaattactgattaaatcttaatagttggcaaattactataaatattttttgaatatttattcaatctcgtttgacccgttatttcgttagcaatgagcttttctctcgctgacaacatagaatactataccaacaatccaagacatcgtcaagcgattgtttacttttttttgaataaaaatataaaaagtttcaaaagcgtacattgttgaatagatattcaccgattgtccgaactaattcaagtgcgggacactcgtgacttctaacttatccagtaatttcgtgaactcactagggttcgcaaatcgaaaaccggcttcactaattattctcaattgttcggtataaaaatcagtctcatgagctccccactgaaagacaaagaacgaaacgttctcaccttcaaggttaatattcgctaaattgatcaatctcaattcgttaacatcaatatttagctgtgcttggattgcaattaatacagcagcaagtggtgtttgatcatcttgcttattggtcaccagcatcttataagaagcatcaacttgtggttggaccaaaaaatcatattgtccttgctctgtcttatacataatcgttccggctactttagcactcatacattctcacccttattcaagtcttctatcgcttcttcagtccatcttggtaatcgttctgcaatgggcgcaaacccaatatgaatccggcgatttgtccaatagtgtttcttagcacgctgtggtgctaaatcttgtgctttatgtagcgcacgtaacgacaaactaatcttatgtgtgtattcatcgatatctaacactaatacatctaacacttgaccgactttaaactgttcatctaacgctttaacaaaaccatgaccacattctgagatgtggattaagccttggaccgttgcatctaatgaaacaaatacaccatatggttgaatgcctgttacagtacctgtaatcttttgtccaattcgataacccatattttcctccatttcaatattcctatctattttaagccttccagttagtaaaaggcaagctatcggctaagaccttttatacaattccttctataatatgtaaaaagaacctgaggaaacatccctcaggttctcatttaactaaagttgatcagctgctagtaaaagtgccccagtaatcccagcgtcatcccctaatgcaacatgcacgatgtagtcatcaaggtcaggcgtttgcacataacctgccatttgacgtttaaaggattcacgaatcattgggaatagttgggcttgtttcgacaccccaccaccgaagacaattcgttctggcgatagcattaaagcaatatttacacaggcttgagctaaatagtcagcttccatttgccatgcttgatgatcagccggcaataagtggcctttcttgccccaacggcgttcgattgctggaccagctgctaagccttccaaacaattgtggtgataaggacatgtcccttcgtatgaatcttctggttgttgccgaattaacatgtggccgatttcaggatggctgtaaccttgtaaaatctgaccgtgttcaacaacaccgccaccaatccccgtcccgacagttaagtaaacacaactatcaagtccatcagcagcgcccatcttcaattcaccataggctgcggcattcacatccgttgtaaaagcaaactgggtatcaggataatgagctttcattgctcctaagatatcatagtgttcccaccctgctttgggtgtatcgatgattgagccatatgtttttgatttcgggttaacatcaattgggccaaacgatgccaaaccaatggcatctaaatgatcgaattgatcaaaatattcaaataaccgtggcatcgtttgttccggcgtctcggttggcatactaattcgttcttgtatcccattttttccatctgttacggcacagacaaacttcgtgccccctccttcaattccacctactagcatctaaaacacctcttcaattaaaattaaagattaatcgtaatgtgattgatgataacttcttcaactggtttgtcttgcattcctgtttctgtagcgttgatcttattaacaacgtccatcccactcaagacgtgaccaaatacagtatgtttaaaatctaaccaaggtgtaccacccttttcataagccgtaatgacttcttctgggtaaccagcacctggcatttgtgacaacatgttttggttgatatgttcgtttgttacgatgaagaattggctgccgttcgtattaggaccagcattagccattgataatgcaccatttaagttaaagacttcttggttgaattcatcttcgaaaggttggccccagagactttcgccacccatcccagtaccggttggatcgccaccttgaatcatgaaatcgttgatgacccggtggaaaatcacaccgtcatagtaatctttttcagctaagccgataaagttttctactgtcttaggtgcttggtcttggaaaagtgctactgtaaattcgccacggtttgtgtcaaaagtagctgttggccctgcaaagtttgcaaggtctaattgtggatatgtcatttaatcgtcctccttgttttgactcacaatcattatgatagcgaattgcttcataaattactacgattatttcattaaacatgctttccttatttttttctagtatactaatttaagaaatctactattaaggaagttatctcatgcttgattcaaatcatctctttgatatcaccattattggcggcggtcctgtcggaatgtttgctgcctattatgctggtatgcgcaaggccgatgttcagattatcgaaagtctccccgaactcggtggtcaagtcgcaacactctatccagaaaagcaaatctatgatgtcgctggtttcagtggtatctctggtgcacagctcaccgaaaacttaattgaacagctggcacttttccaaccaaccttgcaattatccactgctgtgcaaggtatcgaaccccaagaagatgggactttcgttcttaaaacaacgaagggcacgacacgcaccaaaggcatcatcattgccgttgggaacggggctttcacaccgcggaaactcgctgtcgattacgatccagaatgggaaaatcactatattcactacttcgcaaaagaaatggcgcagttcaaagatcaaaccgttgccgttgctggcggtggtgattcggccattgaatgggcactaatgctcgaaaaagtggctaaacaagtctatttaattcaccgtcgggatcaattccgcgggcttgaaagtagcgttgaagcactcaaacaatcaactgtccaaattaagacgccgtttttaatcgatagtttgaccgaaatgaaccaacaactcgcattaactttaaataagatgaaatcaaccgatcaagagcagctaacaattgacaaactccttgttaactatgggtttatctctgatactcgaattctccgtgattggggattaacattggaccaccatcaagtcgctgttaaccaacaactcgagacgaacatcccgaacatctatgcgatcggcgatattgctacctaccctggtaaagtgaagttaattgccagcggatttggtgaagcaccaatggctgtgactgagttactaacgaatctctacccagaaaaacgccaaccactacacagcacgtccattatgtaagagtgcgcaatatgcccgattaccttctgaggattagcctagtccagtaaattagcgacgcagtcgatgatttactggccgtagctaaccggaagaaggtggcttatggagcacgtttcgataagagtgctttaactagcggttagcttctgagtatagcatcggttagtgaatgagccgcacagccgaccgtttgcaaaccgtggctaaacggaagaagttgctagctaaagcacgttttaaaaaagccctgcatcaacgttttaaccgttgatgcaggactttttagtattttattaagcattattttttttcatttgactcttaaccgctgtgataaccatcggaatcaatgagaccccgataatccctaacacaacgagtgagaaatgttcacgcacaacagcaatgtttccgaagaagtaaccagctccgcaacagagtgtcacccacaagatactcccaatcacgtcgtaacggaagaacttcatgaaggccatctggctcccaccggcaacaaatggaacgaatgttctaataatcggcatgaaacggccaattgcaatggttttaccaccatacttatcaaagaagacctgcgcctcttcaattttctcggtattgataaacttgccgaagaaccgattcttcgtggcggctaaaccgacccgttggccaatttgttcattcaatgaatcacccgcaattgaggcgattaagaacaaggcagcaaacagccagacattcaagtcattatcagtccgggctgccaaagcagcagcggcaaataaaagcgagtcccccggtagaaacggtaagataaccgccccggtttcaacaaagataatggcaaacaagatgacataggtccagttgccgaactgattaacaatgttgaccaggtgggaatcaatatgtaaaacaaaatcaattaactgcgtcatgcgatttctcctatactctttttcaatttaaaaatatatcccttattaggataccgaatccatgcatcaaagcaatcacttttgcattttcttaataaaaagccaaacgttatagcgcacgtttaccgcgccataacagccaagcaaaactaccctctaacaaaatgaagaagagtgcaaaacaaaggccaaaatagacttccggtaacactaagataatcggatcagtgattggatcaaactgccagttcagattgcgaaacaataattcgtggaacgtaatgaaaaaccgatcgaaattcatactagcaataaaccctaatatgggtggcaccacaagagcaacttgcattgggcggacgtattgccaaacccgattggtcttgcgccgactccgccaatgctgaatcgccactccaatcgttactagccaaataactactgctaaaccaaacaagcgtttcacttcaacaaaatgttgccgaccatccaatgacattggaaagtcaggtagttgtaagcgtggttgccatggcacaagtaagtagcccattaaccggttaaagttcatcatcagccgcggttgcgttaattcccgttgactcgctagatcgaggtagtgactcactagcggataaagtgcccagcttaacaataacgttattaaaatcgcactgctgactaacgccaaatacaacgccgcccaactagtggtacttctaacccgctttaaacgtcccattcggttaagtcgttaatgatatgcgttggttgcaaggcttcttttgccacatcctctggcgttgaaacaccagtgtaaactaacaacgtatccatccctgcattcaagccagccttgatatctgtattgtagttatcgccaaccatcaccacttgttccttcgtcaagccgaattgctctaaggccatttccataatgattttttcaggcttaccgatatagagtgcactttgttgcgttgcccgttcaaccatcgcaatcactgaaccagcacctggcactagcccgcgttcgtttggtaaattcgtatccgcattggtgccgatgaataatgcaccgcgcttaatcgctaacgttgctaattcaaacttgtgataagtcacatcataatccaaaccaactaccacgtagtctggatcgaattcattggttctaaaaccggcatctgatagagcctgcttcaaaccgagttctccaatcacgtagaccgttttgccattcgctgtaccaccgtttaaattcaatagatagcgcgccgttgccaaagaaggggtatacacttggtcaactgtcgcatgaatgtcatggttatccgccaaattctgaatcacagcagctggtgatttcgtagtgttgttcgtcaaaaacatgaacggaatttgttttgcttgtaggcgttcaatgaaatctttggcttctggcatccgatcacggccgcgatacacggtgccgtctaaatcaattaaataccctgcataatctgtgtttgtcatagttgtctaactccaattacgttttactttttattgtgttccaaaggacggatcttaaaatgacgcttattaactgatttttgattctcggttaccgccttttgagggcgttctttagtcactttttgcttgttatcggtgactttccgttctgtaaaacctggcttttgacgccgacgccgttgctgaccacgttggcgattactccgccgattctcattcttaatgattggcttgccttgacgttccaaaacaaaataggcacaaccaaagttgcagtattcgtatagataatcttgtaacgtattgattaattgatctttattagcgcgtttgttggttgctttgtaaaagcccttcaaacgcagttgttcaaagccccagtcagccacaatataatcgtacttagccaacacttcattatagcgttcgttcaacttttcagcgtcgaagccttcacgatagttcacaacgacttcataagcacatttatcaatctcaagcgtggtttcagtcttcatgacaacgtgttgtggcacttccggttgtttggctgaagcgatcatttctttttcaatcgccttggtcactttcttggcaatcttgggactgtttttcgtatccgccacagcgaacctcctcttcccttataagggataatgtttacttaaatatttagcgaccgcgtctctgagaaaatcagggaacacgatctcggtctcgccaacaatctcaattgttggaaagaatggaatgaatagataatgatcgacggtcgtcaacgtatagctggcttctggatcaatttcttgcccatgccaaaagacgcgccgcaatttcatatcaaccgctatcccgtcataaacgatgtctccaaagattttaccacggaaactcatccctttaataggaaacttgcgtaaaaagagccggtttttctccatttcaagcaccatccgccacaaatcataccctttgagcgtcactttaatcagatgcattggatgcggtaattgagtttgcaaatcatctttagtaacaatcccagcctgcaaatcttgcaagaacaagccagtattcaatacggcagcttcagtgctggtcgcttcttcaattgcctttaaaccggtcgtcatcatttctgattcaccaattgcgttgattttaaaagcgtgtggcaacttggcaacatgctcggcggctaattgtgcgtgcccctttttcaggtagccttcaatttctgctgcgtcagtcttcacaactggtaagtccgcggttaaaaccgtccgagcacttttatgcatcacatggtgctgatcatccagttcaagcgtgatatcaccaaggtaatgaccgtacttctcggcagccgtcaataaggtttgattaaccagcagcccctcttctaaaagatgatgcgtgtgcgcaccacagacgacatcaatctcagggaattgttccgccagccacttatcagtcgtaatcccaagatgtgataggacgattaagatgtcatattgaccttcaatcgccgctaattgccgcggcaactcttcactgacagtcgtcggttcccaaccattcggccgataagttaagaaaaatggtgcggtcaaggcaataattgctacccgcgttccagcatcggtcgtcattagtcggtaagattgcgcaaatgctggcctttcgtttgttgcttgttcatacagattagccagtaataccgggaaattcgccttatcatacaaatgttccagatcagcatgactattaccgattccttcattgtttccaatcgttactccgtcatacccaatttgattgagtaactcggtattaatctgaccattcgttgcttcagtcaatggatgactacgatccattgcatccccgatgtcgaaggtcaagaccgtatccccttgctttcggtatgctgcttgatgttctaagaggaagcgccgcattctgggccaattttcaaaatgtgaatgtaagtcattcgtgtgtaaaatatgaattgtttccattttgcttactcccttcagctagtcgtggctggggtttgccagcgcggcttgtttgcgttcaaaaatgatttcaatctcatttgccgcaaggggtgttccaaacggcacccgttcaggtaataattcgcgctctggtgcatcaatcccgacattgatattctctgcaatcggcaacatataatgatgaatatgtccgtgcaagttgaacgtctgttggacctttcccaataataacggatagtgggttaaaaaatactgatggtgattgatcttaattagctcaccgacatcagcaaattgataatgcgccttgccagctgataatcccgcatcatgtttcgccaaatatttcaaaaaagcacggttatcatgattacctttaataataatcagctgcccattcaactgctctaacacagcagcgacttcagcaaaagcactcggcttattgggcaccattgcgacgtcacccaacaaataaacctggtcgtcagcttgcacccgttgattccagttagcaataatcgttgcattcatcgtagctacatctttaaacggacgcggcgcaaaatcattattacctaataattcggcgtgaaaaaaatgcgtatccgctgtgaaataagtcattcacaatcccacctaaccaatatgatttgcttttaaaatctcctgaaaggcttgcgcaactgcgccgtcttctttttcccattcttcccagtggtcaaaatcaaccgcaggcattgtgtaacgttcattaatgtaagcttcgtaagtttggaccgcattcgaatgcggaatgttgagttgtaaaatccggacttgcttaataaatccccggttagccgctagttcggcacgcccattcataaagatgttagccaattcataatacgttgtgccatctaagcgcgtaatttcttcaataatatcaaatgtttggtacttctccgccattgtgttacttcctattctaatccgatttcagttacgtttattctaccaatatgtacacaaaaaaaccactacccgcagatagtggttggcataagagagaaagagaattgataaaaaggtaattgcataagtaccttacaaacataatataccgcctaatgtaagcgttgtcaattgttatttttaatttatttatccgtttctttaaagttctgtaacaatcgtaggcatttgaaaggaataatggtatcttaaaaagagtagtttttatcaattgaggaggccattgatttgtcacagcaacattcacgatgggggcttttagtattaacaagcctttgtttctggtttttaaccggttttaccgttgtcgctcatcgtggcgaccccatcaacgcacccgaagaaacatttcaaagtattgacatggccttttcgcaaggcgctaactatgtcgaactcgatttacacgaatctcaagatggcgtcttagtcatctcccacgaccgtaacttacaacgcgtcacggggaccgatgcgattgtttcgcaaaatacttttgccaagctcagtgaactcaaaatgagtaacggggaaccaccacacagcgtcgatcaattatttgagcactatcaaaacaacccaaatgcgaaattcctcatcgaaaccaagaaaaccaaaaagggaaatccgcaggacatggaagcaaaactcgtggcgctgattcaacaatatcacatgcaagaccgcgttatggtccattccttttccctcgctagtctgcaaaacatgcaacgtttaatgccagagattccccgcatttttatcgttggcagtttacagcggatctcattcgagagttttaaatacgccgacgggattaacatctcatcatccctcgtcaccccaaccatcattaaacagctccattatctccatcaaaaagtgtatgtctggaatgagatgtctgaaaaccaagcgacttggaactggttagtcaacctaaatgtcgacggcgtggtcacgaactatccggcactgggacgccactatcaggccgcacaggatcaagcagaaagtgaagccatcgacacaattgggcaagtcaatgacgttcaagacctccccaccgttgaaaatccatatgaaccaaccctcaataaaaagccggctaaagcgggccatatctacaacatcaccgaagccgttacaattgccgatcaaacttactaccgcattggcactaaccgctttgtcctcagcgacagcatcaacgtcggtgaaacagcgaaaaccgctgctttattggtgggtaaaacggcgcagattaaaccaactgcgaacattgtcgctacttggaataatccgctacaccccacccagacaaccggttatcttagtgccaattcacaacagcaaattttaggagtgcgctatgttggtaatcaagtctggttgaaagtcgctagtggttggttcaagagtcgccaagcattaatcgacttcaacccaaaccaatcgctgatggtaacccacttttaccgtgaaattccccaacaattgcggccaaccaacttactgattaacccagcactgccactgcaattgccccaacaaccaccagtcgacacgcaactgtttaaccagtttgcccgttctctacaactaactaccattaaattctaacgaggtcaccttttatgacatccgattatgaacaattgattcgttccgtccaaaatactcttccaaaggaagaaacacttgatcacatctcaattctttttaaaatactaggcgataaaacacgcgctaaaatcttgtacgccctctttcaatccgaattgcgggtgagcgatattgtcagtgtgttagagatgtcgcaatcctcaatttcacatcaattacgtgcactcaagcaagcgaaactggtaaaaagtcgtaaagaaggcaaggaagttttctattcattagctgacaaccatgtcatcaatatcttttcgcaagttatcgcccacgtcaacgaacactaaggatcctattgacaccgatcaaattcactttggtcggtgctttttttaatgtcccaaacccatcatctcgattgcattctatcgtgtttggtggtatcttatagtcaacatatgaatatatgctcatatgtttgtttatttagtaaagattacgatttagcttttcactcaacaaggaggcctaaataacatggcacaacttcaattaaccggcatcgattgtgccgcatgtgctactaaaattgaaaagaacgttaacaagatggccaacgttaaaagttgctccgtcaatttcaccactcaaaaattaaactatgaactgaccggccaagaagctgttacggaattcgaacaacaactcgctactcttttgccaaccattgaaccagatgtggggattcaacaatcaccaaccccagaaccatcccccgcaaaacatgcgattaattatgatctcatccgaattctcgtcagctctttaggcttggcgatttcttatcttgtccctctaagcgcgccagctaaaaccacgttgctcctagctgcctttgtagtcatcggctacgatatcgtctggaccgcaatcaaaaatattctccacggcgaatggttcgatgagcatttcttaatgtcaattgcaaccattggggcctttggaatcggacaatatgccgaagccgttggtgtcatgttattctatcaagttggtgaatatttccaatcattagcggttaatcattcccggcgctcaattgctaacttagtggcaattaaaccaaccatcgccaatcggttagcggctgatggcaccaccgaagttgttgcacccgaagcaattcaggttggcgaacacatcgtggtgaaaccaggggaaaaagtcccgctcgacggtgtgattactaccggcgacagttacgtggacacctcagctattaccggtgaatctgttcctcgcgcctttcatcctggtgatgaactactcagtgggacgattaaccaatcaggtttattaacgcttgaagtcacgaaaccttatgctgattcaaccatcgctaagattttagaccttgtcgaaaatgcaagcagtcaaaaagcgcctactgaaaacttcatcacgcggtttgcaaaagtctacacaccaattgttgtcggcattgcagccatcatggccattgtaccgccccttttattcggtgctccatttggcgattggctctatcgggcattgattttcttagtgatttcttgtccatgtgccctcgtcatttcaattccactcggctttttcgctgggattggaacggcttctaaaaacggcatcctggttaaagggagtaattatctcgaagctttaaacgatgtccaaaccgttgttttcgacaagaccgggacattgacccaaggtagtttcagcgtcaccaccgttcattcggtcgatcaacaacctgatgaacttttagcactagctgcccttgtcgaacaacactcgacccatccaattggtcaatcgattttagcagctaaccaaacgccactcacaaagacgttatctgacgtccaagaaaccgctggtcacgggattagcgggcaactcaacggacaacttttacaagctggtaaggctagttggttacaagccagtggcatcgcaacactcacacctagtgaagtgggcaccagtgtccatgttgcttacaacaaccgctacttggggtatatcgtcattgcggacaccgtcaaaccagatgcacaaacggctgtcgcgcagctaaaacacgccgggattcatcaaacaattatgttgactggcgataaccaacccgttgcgcaacaagtcagcgccgtcttaggtatcgataagtatcaaagcgaacttctgccgcaagataaagtggccgccgtcgccaaactcacagaagaccgcgctaccaacggaaaaatcgtctttgttggtgacggaatcaacgacacgcccgttttagcccgtgccgacgtgggcgttgctatgggcgggttaggttctgacgccgctattgaagctgccgatatcgtcttgatgtccgatgaaccgacaaaattagcaactgcgatttcgatcgccaagtacacccgccgcatcgtttggcaaaacatcattttcgcattagtggtcaaaggcatcttcttattattaggcgcctttggaattgccacaatgtgggaagccgttttcgccgatgtcggggtaacgttaatcgcgattttaaacgcacttcggattttaaagaagcactaaccttaaagggttcatggagactttgtgaaccttttattttttaatggcaagcgctttttaaatctgtaataatatgctaaaatgtgaatagattaataattaattaaccgttttttggttaaaatttaacaatgaaagctgggactgcaatgacattgaattggcaacaagaagcagcaaagtataaggatcaaatgcttgctgacttaacaagtttactcaagattaatagtgcgcgcgacgttgaccataaagaagacgacgcaccacttggccctggcccccgcgatgccttgctacaattcttagcaatcgctgaccgcgacggttttacaacaaagaatgttgaaaacgttgcaggtcgcattgaactcggtagtggcgatgaaatattcgggattttaggtcatatggacgttgtgcctgccggtgacggttgggaaacaaacccatttgaaccagtgatcaaagacggtaagatttatgcccgcggttcatcagatgataaggggccttcaatcgcagcatattatgctttgaaattattaaaagacaacggtatcgaattaaacaaaaaagtgcacttcatcgttgggactgacgaagaaagtgaatgggttgggatcaaccgttacctcgaagttgaaccaaaacctgactttgcaatttcgccagatgcaaacttcccaatcatcaatggtgaaaaagggattgtgtcatacctcatgactttcaaaccagttgacggtgctgatggcgatatgacattggttagcttcaaatctggtttacgcgccaacatggtgccacaaacagctaaagccatcttaacgggtgcaatgccagctgatttccaagctaagtttgacgcctatgttgccgaccacaagttacaagggacaatcacaactgacggtgaccaaacaatcatcgacttaatcggtaaaggttcacatgctcaagaaccaaaagccggcgtaaatgctgcaacacacttggcaactttcttagctgactttgccttagatactaaaggtggcaactacatcggaacaattgcccgcttaatgcacgaagattcacgtgggcacctcttaaacatcaaccacacagatgatgtgatgggcgacttaacagcatgtcctgcagtcttcaactacacacaagatggtgtagcaacagtgctcttgaacgtccgttatcctaaaggtgtgactgctgaaagcacacgcgacggtttagcaaacacacttagtgatcttgctgacgtaacaattgacggtcatgcacaagaaccacattacgtgcctggtgacgatccattggttgcaacattattaagcgtcttcgaagaacaaactggtcttaaaggtcacgaacaagttatcggtggtggcacatatggtcgtatcttagaacgtggtgttgctttcggtgccttaccagaagaacgcgaaaatgtgatgcatcaagcaaatgaatatatgcacattgaagatatcatgaatgccattgcaatctatgcagatgcaatttacagattaacaaggtagagtgtgacgtaagtcgggtatccaccgaggattaatacaaagttgtgaatgattgcgtagcaatcgtttgcggctcagggttaaccggaaggatatggctgatagaacacatttagcaatcaaaaacggtccaaagcttaatcgctttggaccgtttttttgattgccttcatttatcagcaggcatcagcttaaacgttgaatgcccatctttgacaattgcgtataagatttgttgctttgtttcatcgaagtaaccgagattaacagccatttcgccatcaatctcttcaatcccctcaaaatgttcccgaattatcgaacgaacaaccttcatgttatccatgtgtttttgaattttctgtacagcaacccctagcgtgtagccttcatctaagaaatgcttgataaagatcgccttaatcattgtttgcgcgtcgtactcgcgggccttattgccatccaattcacgcgctttaatgtatcctttttgctcccagtagcggagttgacgcggtgtaacccccgccattttacaaacttcactaatcccaaaaatcaatcgatccgtatctattaactttaaaaaaaggtctttttgcaagtccccactccattcctattattatttttcattatagataatctattgggattgtcaagttaaataacacctttgtcaacttacttgacaaagataccaaatgcgtctaaactaataaatcgcatcaacaaaaacacacaaaggagatttttatcttgtcagacgctagaccattagatattcatgggaaaccatataatcggacagtcttagtcttggtcttattgattggtactttctgtaccgtcttgaaccagacgattttatcaactgctttccccacattaatgaaagcattcgatgtgtccacctcagccgttcaatggctcacaaccggtttcttactagtcaacgggattatgatccccattagtgcttggttaattaaccgattcaattcaaaagtcctctacatgtcagcaatgactgtcttcttaatcgggactattatctgttacatcgcaccaacgagctcatttgcaactctattaatcggccggcttgttcaagctgctggtgttgggatttcaatgcccattttgcaaaccattatgctcaccatcttcccacctgaaaaacggggaacagccatggggatggccgggattgttatcggcctggcacctgctttagggcctaccctttcaggctggattatcgattcatacaactggcgtgttttattcggcatgattattccaatcgtgattctcgtcttagtcctcgctagtttccaaatgaagagtgttattcaactttcaaaacctaaaattgatgtcccttcaattattttatcaactgtcggcttcgggagcttgctttatggcttctcagaagttggcgataaaggctggggcgatgcgctcgttctcacaaccttagcaattggcgttgtggtaattgctttattcatctggcgccaactcacgatggaaaacccattcttggaactccgcgttttcaaatcacctgtcttcacaattgccgctattttaagtggtgtgacgaacatggcgatggtcggtgccgaaatggtcttgccactatacattcaaaacattcgtggcgaatctgccttccattcaggcttaacgttattagctggttccctcatgatggggattatgatgccaattacgggccgtatttttgataaatatggtgccaaacgcttagcaatgaccgggatgttcttattgatggctgcaactgcgccattcatcttcctaacagctactaccccaatcatctacatcgttgtgttatacgctgtccggatgtttgggatttcaatggtgatgatgcctgtcacaacttccggaatgaacgctttaccaatgaacttaattagtcatgggacagctgttaataatactttccgccaagttgccagctcaatcggaacagccattttaatcagtgtgctttctagtgttacaaaaggcaatatgccaagcacacacatggtcaagacattaccattggccttccgcgataagatgattgatgccaccctttctggttatcacgcagccttcatcgttgctgtgattttctgtgtgattggcttcatcatcacattcttcctctcttcaaagaaatctacgattaatggaggtgccaaggcatgatcgtcattacactcgttatcagcacactcgcattattcttttcatcgattttcggtcaaaagatgtggcgaccaatcttaatgaccatctttggactcacatttatcgcttcactcgttttcatcgtccaaaatgatcacagtcattacggaatgaaaactgtgaccgaaactaagacgcacacgctcgtttcaagcgcagatgcgaagggcatgtcaatgcttctctatcacccacttggtaacggcactgaaaaagtctatctttatcggaccgatgccaaccaaagtaaacccaaagcaacccaaactgaaaagacaaccaacagtgttcaaaaaaatgctgataaagcagtcttagtgacaaccaccaaataccgcgtttatcaaaataatacggctaaattctggttcggaatttctggtaacgaccacgaattcgtaagtcgtcacaacacatttaaggttgctaaaggctggttcgttctaagtgatgttcaagctaaacaactcgctaaaacattaaaaggtcaacaagcacaacttaaaactggcgcagaaaatgccggtaaacaagctgtgatggctgctatgcaagccaatccagcaatgactgctgatcaacaacaagcggttgctaaaaaagcagcaatcgcctatcaacaagccgcaatggctaaagtgatggcaacattgaaataatgcaatcaaaaaatcccccacatcgtgatttgatgtgggggatttttttgtggtggaaatgtgctccgtcatccatatccttgcggttaaccctgaatgtcaaacgattgctgacgcaatcattcgccatcctgtgttaatcctcgggatatacccggctggctacgcactctgttttgaaacgggctttttgaaatatcttcctgcgcttaaccaaatttggcaaatcgacgatttcatcgtcaattcgtcaaatccagttaatgctcagaagatacccgtttcaaacgcactcttattttgaaacgggctccatcaggcatactcttccggttagttacatatcgaaaacgatcggctttgccgctcattcacgatatgccactaatcctcagagcataaccgcctgctgtcgcactctatttgcttaacaagcttgctgctgcttcgtctacgatgattgtcacgtcgtcgtgtagttgtaatgcacttgctgggacgtctgttgtttgtgggccttctactgtgcctttgatggcttcagcttttgatttgccatatgcgaacaagacgattttcttagcttttaagattgagccaatccccattgagattgcttttgttggtacatctgcttcattttcgaagaaacgtgcgttagctttgattgttgattctgttaattgcacttcttgtgtattgctgtcaaacgcagcaccgggttcattgaagccgatgtgaccgttttggccgatccctaagatttggatatcaactgggttatcagcaatcacttggtcatagcgttttaattcagcagaaatgtcgcttgctaagccgtttggtaagtatgatttagtaaatggtttcttgtcgaataagttcttcttcatgaaatagtggtaactttggtcgtcatcagctgataagccaacatattcgtccaagttcacggatgtgcaacctgtgaaatctaagtcgctagccactaatgtttcgtagaatttaattggtgaactaccagttgccaaaccgaatactttagcgttgtttgctaaaccttctttgaagatttcaaagcttttttggccgccttctacttgatctttcactttaataattttcatcatgattatctcctcatcatttaaaaattcaagccgttcattggtatagtccaattataaacggctaaaatttcaattgcaagccttttgacgctaaaaaacgcgctaaataattggtatacctaacgtttagcgttttcacggcatttcgttaaaagcttacttttaatcgctagcaaacgcccccctttttgtgtctgctaattcaaattggttaaccaattgcactatattcattgattgccgtgcatttctggatatttttcatttgtcttacaaatccgaaatcgggtatgataatgcgctgaactattatataatatgggacagtatgagaaaaaaggtggcgttattatttgaatgatccaaagcaccgttccagtcgatggcgagcactgctccagtcgagcagacaaaaggtctcaacgctattgacatctgctaaagacagactcgcacatttgctccatttacccgataaacgttctgcacaaccaactaaggaacaaaaaagagcctacatccaagagttgagccaatcaccactctcttttaagattaacgtcttctttgaagccattaagagtatttttctctatgggatctcaattggcttaatctgtatggcgctcgctgctggaattggcgcgggctattttgctgcgttaatgaaatccgaaccaattcctagttatcaagtgctaaagcaacaacttgataataccgatcaagcagccggtttatactttgccaagaacaataagttcggcgcaatcaaaaccgacttaattcggactcccatcaacatccatgagatgtccccttatctaaaggatgcgattgttgcaaccgaagatgaggatttctataaacacgatggggttgtccccaaagcactcttgcgggccgttatttccgatgtcactgggtttggttcacaaaccggtggctcgactttaacgcaacaattgattaagatgcaggttttaacctcccaagtaacctttaaacggaaagcaaccgaagtcttgctcgccttgcgggtcgataagtatttcactaaaaaagaaatcttacaagactacttaaacgttgccactcttggccgtaacaataaaggacaaaatatcgctggtgttcaagaagcagcattgggcctattcggcaaaaatgctaaggatctttctctagccgaggctgcctacattgctggtctgccacagagtccttccgtctatacaccatatgatcaagacggcacccttaaagatcctgaatacttaaaatatggtctagatcgtaaaaataccgtgttattccggatgtatcgtgacaatcgcattacaaaggctgaatacaaagccgctaagaaagtcgacttaaccaaagaattccaaccaaaagccgatccagccgaaacaacgaagagttatggctatgtttataacttacttgaaacacaagcaactgatattatggccaaacagttagccaaagaagccaatgtttcaactgccaaacttaacaaagatccaaatctctacaaacaatatgaaacacaagcaactgaattactcagcactaaaggctatcaaattcacagtactatcgatcaagaaatttacgatgccatgcaaggggttgttcaccaacagggcgcaacattcggacggacttataccgataccgttactgacgaagaaacggggttacaaaagaccgtttcgtcccctgttcaaaacgggagcgtcttgttagataaccgcactgggaaagtgatttcttttgtcggcggacgtgatttctcactcaaacaaacaaactacatgttgaccaaacgttctcctggttcaactatcaagccattgttagtctatggtccagcaatcgatcagaaactgattggttctaaaacgatgttggccgatttcaagaccaacttcaaggattacgcaccaaccgattacggtggcacgatccagaacaaattcattccagctgacgaagcgttagcccagtcattgaatattccaaccgttaacctttataacgctttgaagaacacaacagatccttctaagtacatgagtaagatgggcatcaacctcaccgctgatgaatacagtcaactggggatttcacttggtgggaccagtgatggggtcagcgtcttagaacaggccagtgcattttcaaccttcgcggatcaaggtgaacataccgacgcctacgtgattgaaaagattacggatcccgccggtaatgtcgtttaccaacatcacgctaagaagaaacgcgtcttttcaaaagcaacgtcgtacatcatgaaccaaatgttagccggcgttttaacagatgggactgctacttcaatttacgatcaactctactttaataccaacaacttagttgggaaaaccgggacttcaaatgataaccgcgatatctggtttatcgggagtacccctgggatcaccctcgcttcatggatgggttatgacagtactggtcgtaacttaactgacaactcaagccagattaatgaaagatactggtcaaaattggccaacagcgtttatcagatcaacccaagcctcatgcgtttggaagatgatcatgaaaagccaagtacggtcacaagcagcaaagtcttgaaattaactggtcaattacctggcacggtttcaatcaacggcagctcacagaacttgaacggttcaaccgtcacctcgctttataacaactggacgccaaaagcaactagctatgaattcgggattggcggttctgcccggaactacgaaactttctggaaccactatttaggttataacaacggctatggttcaattacctatagcaccgctgatgaattaaatccaactagtggctacagtagtcgtcgcagtggcaccgcagcaacaacgacaaataattacacagcaaacacaactggtactgctgctacgactggcactacaaccggtacgaattatacagcgaataccaatccaacagatacagagacaacgaactaaactaaaaaaaggcctcagttctaacgatttaaaatcgtttggaactgaggccttttttgattggtggaaacgtgctcttgtttgcaacaacttccgcttaatctaaaaatcccgttaatcctaaaacctggattaacgggatttttttattaatgctcaattgctgaccgcaaccaatagcactctattttgttgattctcttgctacgatactgtatggcaataggattgtcttgtcgtttacgtcttctttgttcatcatctttgttaaaagccgcattgctacggcacccatatcatacaatggttgtgagattgacgtcatcttaggacgtaccatttcagttaacttcgtgttgttacttgtcacaacttcgaattcagctgggatttgaacgccggcatcaactgccccgttcaagacaccaactgccaattcgtcatcactgacaacagcagctgttgccccagttgctttgattttgctgaacaatgcttcaccagcactgtagctgtattctgtttcaaaaattaaactttcgtcataagcaatgcctgcttcattcaaggcatccttgtaaccgcataaacgatacttgctgttaattgggaatttcaagctaccacaaacgaacgccactttgtcatgaccatttttgattaacttcaaagttgcatctttaacagcggcaacgtaatcgatgttaacactacccacttgttcgtctggatcaattgaaccagctaacacgattggtgtctttgaacgtgagaattcagcgcggatttcgtctgaaatactgtggcccatgtagattaaaccgtcaacttgttttgccaataaggtattcaacacttgaacttccttttggttgttttcatctgagttagccaaaataatgttgtacttgtacattgtcgcaacatcgtcaatcccacgagcaagtgatgcaaaatagatgtcactaacgtcgggaatgatgaccccaaccgttgttgtcttcttgcttgctaatccacgggccaccgcatttggacggtagtcaagacggttaataacttcaagaaccttcttacgtgttgcgggtttcacattcgggttaccattgacaactcgtgagacagttgccattgaaacgtcggcttcgcgcgcaacgtcataaattgtaattgtttgtttttccatgattaaatgattcctttcatttgtaaaataaaatagattatattttcagcagttttcattttacttcttgattaatttaacagagatttaaagcaaatgcaagcggtttacactaattttcatgaaatttacatttttgttttcatttgtggtttacattaccgtttacattggttgtgatatactagtgatatcaattgtaaaggaagtgctttagatgaataatcaattagcccaattacaaaattggcttggtgagaataatatggatgtggcttacatcagtaatccaaccaacatcctctatttcactggtttcgaaagtgatcctgcagaacgggtcttagccctctttgtttttgcagatcaggacccattcctatttacaccacaattagaagttgaatctgctaaaaaagctggctggaaactcgacgtttacggctatctcgatcacgaagatccatacgcaatcatcgcagatcaaatcaagaaacggaatgcgaaccctacacgttgggcacttgaaaaagacgaccttcctgttcaacgttacgaagccattctaaagcaattcccagacgcaacattcccaggcgacgcttcacgtttcatggaaaacttaaaattaattaaaacacctgaagaaatcgctttaatggaagcagccggccgtgaagccgattatgctttcgaagttggtttcaatgccttaaaagcaggtaaaacagaacaagatatcgttgcagaaatcgaatacgcattaatgcgcaaaggcgttatgcatatgagttttgataccatcgtacaatcaggtatcaacgcagctaacccccatggtggccccgaagccaacattttaaccccagatgccctcgtgctctttgaccttgggacattgcataagggttacatgagtgatgcgacgcggaccgttgcttttggcaaacctgatgcgaaatcactcgaaatccacaaagtctgtcttgaagcaaacttaactgcccaagcagcaatcaaacccggtatcacagcggctgaattagataagattgcacgtgacgtcatcactaaagcgggctacggcgaatacttcatccaccgtctaggtcacggcattggaacttcagaacacgaattcccatcaatcatggaaggcaacgacatgattatcaagccaggcatgtgtttctcaatcgaaccaggaatctacatcccaggcgttgccggtgttcgaattgaagactgtgtccacgtaacagaaacaggatcagaagccttcacacacatgacaaaagaactacaaacattctaagagtgctgattcaaacgggttggctttgaggattaacttaaaaacgcggattatgacgcttttcgtcatgattcgcgtttttggttaaccggaaaaggcagtttgaaacagcacgtttcaataagagtgcccttaattgcggtcagcaactgagcactaattaaaaaaggcagacgaaatcacaaaatgatttcgcctgccttttgttttaaagaactttataatccctagtcgttaaccattcaaactatgttacagtaatcctaacagtaagtttatgacggtggctaacgctcagaaatgaggtgatgcctatgttgattaagcgttaccttgagaaaggataacatgtcggttttcaacgcactgatgttggcaatttcggttgccatgttagtcattgagattctgaaatttaatcaaaaaaaataaccgtctaaactttgacgagtcacggttattttttaccaaaaacttgccaccgtcttaagcggactgtggagaagagtcgtgttgtcgcacggctctttttctatgctttcattataacaccgacttttaaaatttgcactagtcgtcaattcaaacaagcaaaaaagcccccgctaaatcaggcttggcgggggctttttcattgattatttatcttcagtgacttcttcttgaacagtttcaacagcggcggctgcttcgtctttggcttggccaaatgcactcttgccgtcgatcacgatatcgtcgaaatcttcttggctagcttcaaggctgccgccaaattgtgatttcaagtctgctgttttttcatcaaattgtgcttttgcttgttctttgatatcagacgcattgtcttgccaatcacttgcataatcatggacgcgattcatgtgtagctttgcgtcgtcttttaagtctgctgctgtttcacttgctaaatagtagtagtcttgtgcgcgatccattaaatcatcacctaagtccactaattttgattgtaattccttacccgtcttaggagttaacattaatgttgcaccaatggctgctgcgccaccgactaatacacctaatagaaaatgtcctttttttgccatgagaattactccttatcctttgtttgacgtcgattttgataaaatcttaatgcacttgcgccaaccttcgaagcgaccgttgccttagcggttgtccgcccaacgttggtaacatgttccgttaaattgcgacttgccgtattcaaacttgaaacgctctcgccaagttcgccagccgctctgaaaacaggatccaagtcagcgactttcccgttcacatcgtctagcaatacgttggctttgctgagtaaaccttctacttctttagataaaatatcaacattctcagtaacaaccgtgacactcttgttggcttccgttactgtcttagaaacatccgttaatacttttgtgacttttaatagcatcactattagaaaaacaactaggaccgcaaaagcccctgcggcgattagcgccgcaatttgaccacccgtcattgatttgttcctcctacttcgttatctattacattgcctcttaaagactagaatagcattatttcccttaaccttcaattatcttcactatattaggtgccattttttctgacatttgctaaactaaagacatgctacaaaaaaggagtttcacgcatgttcacacgtttattagcggccgcaccaactccggtcgaatctgttcagaaacagaccaatatttttatgcgctacatcacttcaattgactgggataaattactcagcaccctcgttgctggattgtttcaaattatcctactctccgctttattctacctcatcaatcgcttaggtaaatacatcattaagcgcagcttcagaaaataccgcaaaactgatggtttctcaagtaaccgcatgaacaccatttatactttgatggtcaacgctttttcatacctcgtgattttcttctatctctatgcgctactcagcgttctcggcgttcctgttggtaccttgattgccggcgctgggatcttcagtttagccattgggttaggcgcacaaggtttcgtcaacgacatcgttaccggttttttcatcctcgcagaacaacaattcgatgtgggtgatatggttaaaattggtacggtagaaggcaccgtcaacgcgattggcttacgaaccacacaagttcaaagttacgatggcaccttaaatttcattcctaaccgcaatatctcgatcgtcagcaacctatcccgcaatgatatgcgtgttctgattaacattcgcatcttacccgacaccgacttacaactgttagcggcaaccgtcaatgaagtcaatgtgcaactggtgcccaaacatcctgaaatacaagatggccctacgattctcggggtaaccaccctcgcagatggtgtccttgcttaccagattgttatgcacaccactaacggcgaacaagctgccactaaccgtactttcttacaggcttacttgcaagccttgaatgaagctggtgtcccattaccttcaacacccgttacaattcccaccaaataaaagtcccctcatataaaaaggagaaccgcttatgccacttattaacgcactcaaaggcgccctaatcggcgtcgcactcgtaatacctggtctatccggcagcattttcgccgttatcgttggtctatacgaaccgcttctggcggctatcgcgcaattcaaaaaagattggcgccaagcaattggctttttatggccaatcgggattggcgctgggatcggcgtcttactctccaccaaaatcattctttggttatgcaccgcttatccactagcggcatacagtttcttcatcggtcttgtcgtcggcagtctcccattcatctggcgtagactcgccggactcaactggcaaaaagtgttaatcgccatcgtctgtggcgcaattatgctactactcacccagattggtggtcaccaatctgaatccgacatcgctatcaaacaactcactaccctccaagactttggcacgttactatttgccggcttcttctcagtatcactcatgctcatcccaggcgtctctgggtcaatcatgctcatgattgtgaagcaatatggcactgtttatcacgctgtcagtcaactactcgacttaatggtctacctcgtcacaggacgcttgacacaagccacagaagcgttcaaaagcgtcgcgctcctcttaccgttcatcattggggccgtcatcggaactgtgattgttgctaaattaatgcactacctattagcacacttcgtcgaatacgtttacgccggtgtgctcggcgttgtcattgccgccatctggattcttgcccaaaccggcgtcgcaccagcctggccagccctaacaaccgccacagcactactaggacccatcgcactcatcatcgctatgatcatcctaggcacaatcgcaacaatctacttcgacaaagcatagagtgctgttaaagcgatttgcctctgagcattaattaaaaatgagcctcaatctcgtcttttgagattaaggctcattttagattaagcggaaggtgttgcaattaaaaagcacgtttccacaaaaaaactatccacacccttcccaatcaggttgtggatagtttttatttattatagtgctttaatcgctctaagatgttcaatggattgaagtcaatatttgagacagattttaagagacattcagaaccgcgtttaccttctacagctcaaataaatcattaatcgcgacaaggctgtttttgtttaaatgtgtgctattagccatctccttgtggttaatcctcaggagatggctgatagcacactctttttttaattggtttcaataattgtattgttggctgtattattttgtggttcgctggagacttcaaaccagtcgatgtaaccgcgattgaattcgaccacttttaatgtgaattgattgatatgaatgaccgcactttgttgtaagtcggtgaagttttctaagacataaccggccagggtcacgctatctgaggcttcgaaggcatcaattttagtcttgaagaaacgttcgaaatcatagagcgtcgttttcccactgacacggtaacggttatcgtcttctttgatgatatattcatctgaaacatcgtcaatttcgtccttgacggtcccgaatagttcttcatagatatctttatcagtgacaatcccactcgtcccaccgtactcgtcaacgacgaccacaattggggtttgcttattgatcatttgattcaacaaactgtgaataggggttgcttctggaacggagataatcgaacgcagtaatttgctgacgcggattgaatcgtcgacttgtgcctgacggactaaatcatatgcgtagacgtaaccaagaatcttgtctttatcattttcagcaaccactgggaagcggctaaagccttgttgtaagtagtcttttaagacgtctttaacggtatcggtgatatcgacgacgtagagacttgtgcgatcaaccatcacatctttggcaatccggtcattaaagtcaaaggcccgttgcatgtaaactaaatcgttgcgatctaattcaccaccagtgacggcatttttagagaggctaatgatttccgcttgggaaagcacatcactaccttcttcagcaggtgaaaagccgattaatttcacaacacccgttgcggaaatgttgagtaaccaaacaaatggatagaagataatatgacagtaatggaggggcttagcaacagccatcaacatctgcattggaatatcaatactaatattcttcggcacgatttccgtgaaaaccacttctaaataggttaagactaacacgccggcaactgcgccgatgatgtgtaagccaccatttgaaatcaggtgagtgagaccgagcagatcgactagaatggtttcgacggttgattcaccaatccaccctaaaataatcccggcaacactgacccccacttgggtggttgagagatattcgtttaagttttgcgtcattttaagcgcaagattcaattttttaggattaccatttcctgaatggatggcatcttctaaggcacttggccgtgtttggacgagcgcaaattcagcggccacgaagaaggcggctaaaaagaaggtgaccaacataacaaatagattagtgaataactcaccacttgacaaaataattccccatttcttaactaactagttctattttaccattctcaagcttaaaacggtaaataacgtcgggctttagtccgattttatcggattcaataataatgaaaataccataatttagggaagaggtaaactaaattgttaaatatctaaactaaaatacgctttgtcacattttgacgttgatctgtatcgaaaaaagccactgtgttagtggcttttaaacagttttagaatgttgcagtatcaggatcttgcgcgtgtccaacgacgccgtcaagtgcatcaattgcagccatgtcttcatcggctaattcgaagtcgaaaacttgggcattttgttggatgtattcagcatgcacagacttaggtaatggtaagaagccgtgttgtaatgaccaccgtagtgcaatttgtggaattgagcgttggtatttgtccgctaattcttgcatttctggcacactgaaaatcttcccagtcccaagtgggctataagcttctaataacatgccatgttcacgtgagtattgggcagtttcaggttctaattcgccaggggctaagaagagttggttgaccattggttgtaccgttgcagtctttttgagcgcttctaaatggcgaacacggaagttgctgaccccgatggcccggactttaccagctttgtagagcatctccattgcacgccatgtttcggcgttggctgtttcccaatcatcacggtaggcaattgggttgggccagtggattaggagcaaatcaacgtagtcggtttgtaatttcttgagtgattcttcaaaagagctgattgttaaatcataagtgtgattactattccagattttggtggttaggaataaatcggaacgatcaacgccactagcttggatggcctcaccaacactcccttcattaccgtaagcttgggcggtatcaatgtggcgataacctgccttgagcgcctcttcaacagcagctacggctgtttgaccgtctggtgtttgccaagtcccgaagccaattttaggaatttgcacgccgtttgtgagcgtgtatgaactcgttaagttagacatattaaaacactcctttatcagtttaaaatctctacttacagtttacttgttttcgatagagatagacagaaaaccgacttattccccgggaaataaaatcgatttgtcataagctgagcaatttggcctgaagtgcgggatcaacagcatagaggtaaaggccgtttctagcgcggctcattagaacgtagaggctattaagaataatttgctgtttcgcggcttcaggatcagccagctgtgctgcgccggcaaatgcggcttggtcctcgtaatattcaagatgaataactagccgctcactttgtggatcatacgtgacggatggcccgatgatgacgccggcatagttgagatcaaagccttgaatggtgtacacggatccgacttcatctatactatcttcacgttctgcccaataggttttagcggttggctgataccgatcccagcgtaatttgaatgtcgatgtctcaacgaagtgatcgtgaccatcattgagtgttgctggaaaatcgtaagtagctagcatgcgtgcaagcccactcgtttggtttttaaagcgaatcgtttgatagagctcattggcatcggtgaatattttgaattcaaagtgtggatcatgtggcagggcagcgacttgttgttgatgaaaggtttgcacccaattttcaacacttggatgggcttgcatccgaaattgatgggttagttgcgcggtctgatggggagcagcttcaattcgttggcggagttgttgctgttgccagaagctcttcactttaagcacttgctgttcatcaaaaatcagaatggtgatccgactgtgtcggcgaatttcatcgagttgatttgtttgattgaagtggctataggggtcggatttggttaacagtaggtgtgcctcatcaacgaggacgatatcggcaagttggtggtttttagccgcttgattgatgaatgtcgttgggcgttgaaaatcttttttcaataaaacgggtgccgttgttgtgccacttttgtagagttttagcatttctggatgattgaccaatagaacgttttgactgccatagagtggcgaggtgggtgtttggcgcgcaagtgtctgcagtaccttgaagacactgctgagaatcacgctcttaccagtcccggccgcaccttgaatcaagaaggtggcgtgttcggcgtgcgcgtttgccaaacaaaattgaatgacttgttcttgtagtgcttgttgttccgttgttagttggttggcgggacgattgagtttataaagcgcgctattttgacgctgtgcatttggcaaagtgaggactcctgttcattcatttcaataaaaaaagccccagtagatgtagaaataacatcgcctggggcagtcgtgctaatcgacaaaaattagttggaattcatgttgcactaaatcgagattgacggagacgtggcggttgagatcggccacaattttacgcgctaatgttacccgttcttcgaagcttgtggcaagtgccgcgaattcagtttgtttaaagttgtagttttcagtgataaaaatcgcgtctgtgacatataacaggttattttcatcgtgacgagaaccgctctttaaaacggcatcgatataatggtaaagctgagtaggggcaaagttcaatggttggtctaaaacggttgtaatctgaaaatcaggtaaatcgtcaaccatttgtgtgtttagtgtgacttgggttaatgcttgatacagtttcatagtgacaccttcctaatgttgagatttaaggtcgtgcttgtggagcttctaagtggcgttgaataaagcctaacgtcacatcagcgataatggccatcagggcggttggcagggcaccagctaagattaaggcgccgccattagtggcgttggtcccgcgaataatgatgtcgcctaaaccgccggcaccaacaaacgcgccaatcgctgtaatcccgatggcgaccactaaggcattgcgaatccccgccataatgacggccaatgataagggaagttcaaccatccgtaacagttgccaatttgtcatgcccatcccgattccggaatcgataatattatcggaaacattctccataccggtgtaagtatttttgataatcgggagcaaggagtataaaaagacagtcgcaatgacggttcgtgtgccaagccccaagccaagcataatgattgagagcattgcgagtgaaggcactgtttggatgacattcgctaccccaattataacattactgagctttttccggtgcgcaataaaaatccccaagggaatgccaatcaacgcggcaagtaaaacgccataaatcgaaatcaaaaaatgatgactaaactgccgtaaaacataactgccattatgctggaaataatagacaagttgttgccaagtatttaaattagtcatttagcggctcctttccggaaataattatgttcctgaagaaattgttttgcgactactgcgggttctagtagatcattatcaactttaaagttgagggtttgcatggtgtcgaggtcgattttgccatctagacggtgtaaaaggggcgctagtgctggctgttctttgagaatctgatcagtggcgaccacgctcgcatcgtatggtgggaagaagcggcgatcgtcttttaagacttttaagtcataacttttaatccgtccatcggttgagtaacctaaaacgacgtccattttaccagccgccagtgcgctgtaaaccagtccgatttgcatgggcgcaactttcttgaaatcatagccatacgtttctttaaatgcgggatagccatcgccttcgtgatttacccagacggaatcgacaccagctgttagttgatccgccacttttccgagatcactgacggtttctaaatgatatttcttggcggtttcctgggtgaccataaaggcataggtgtccgcaaacccgtaggaagggaaccatgtttggttgtaacgatctttgaaagcttttttaacgattttttgggctttttcaggatctttagtaggtttcatttttaaagtaccagtaagttcagttccagcgtagcgactagcagctatgtcggcgtcaccacgaattagtgattcatgcgttaccgttgaagaacccagattattaattaaagtgaccttattttgtgtttcgtgggtaatcaactcgctcagaatattggcgagaatttgtgactcagtggtgcttgaagagctaatgcgaattgtttgtgattgacggtttccgatgccaagtgactgacagccacttaacaggaggagactgccaactaataatccgcaactcgtaatgaatcggcgtattttatgcataggagcctccttatctgattgcagcgggggtcagttgtttttccaaccggcccaagccaaaatcgactagcaatgctaacaatgtgacgggaattgtcccgccgatgattaaatccggtttgaaaagattcaacccgttgaaaatcaagtcgccaagaccaccagcgccaatatatgaagcaagggttgcccaagcaatcacgtaaaccgcagataggcgaattcctgccataatcacgggggtcgccattgggatttccacttgcataattgattgtaccggcgtcatgcccattcctttagcactatcttttagaatcggatcgacatcgttcatgccgatgtaggtgttccgcaaaatagggagtagtgagtagataaataaggcgatgattgctggtactttgccaatcccaaagagcggaatcattaaagccaatagtgccaatgaggggacggtctggagcatgctggcaatggcaatcactactttggcagttttaggaaatcgggtgagggcaattccaaggggcaccgcaactattatgcccagaactaaggcgattgcggaaatgtagagttgttcccaagttttaatcagtaaatcagagccatgttctgttaaaaaagtgagcatcatcgattcctccctttctattgttggtcggattctgcttcagattcgtcagtatcaccccagacagcatcataaacgacatcgactagggctgtccgggtgacaatcccaacaagttgatgatcatcgttgataacgggaacgtatttccagccccgtttaagaatccgttcaatggtatcccggaccaaatcattttcgttcacgtaactaatcttggtagacataatgtcaccaacactagttgcgtctttgtaatgatggtcgatattttcaatatcgacgagtccctttaaatgttggttttcgtcgacaaccagtaaggtatcaacgcggcgttggcgcattaagcgaatcgcatcaactaatgatttacctggtgtgatagcgactggacttttaagcatgatttggccaacagtttcgacatttggtttggcttcgatcaaacgatcgtgaccgattaagtcttcgacgaattggttggcaggatttcgcaagatttcattgggcgttcccatttggatgatttggccgttatccatgatggcaatgcgtgacgctaatttgagtgcttcatccatgtcatgggtgacaaagacgattgttttaccgagttctgattgaagttgttttactaagtcttgaagtgcctcacgcgtaattggatcgagagcaccaaatggttcgtccatcaaaataatatcttgtccagctgcaagtgcgcgaatcaccccaattcgctgttgttgtccacctgataattggcttgggtaacggtctaaaaagtccgcaggcatttccactaattttagtaattcgagcgcctttgcatggcgtttttctggggaccattttaagagtttagggacaattgtgatgttatcttgaatagtcatgtgtggcattaagccaatattttgaatgacgtaaccaatttttcgccgcaatttaacggggtctacattagcgagattttcaccatctaaggtaatcgttcctttggttgggttaatcatgcgattaatcatccgcatggttgttgttttcccagaaccagacgtcccaatcaaacaaatgaattcgcctttgtcgacagtaaaactgatgtcatcaacggctttgttaccaccgcgatagagctttgaaacgtgatcaaacgttagataatgtgtcataaggaacctcctattgtgatgattggaaatttattgctatataataactatgttagatacgtaacatgcaactgtcaatgaatacgctttactgataggtatcaaaaagccggtgtaacggaattgagaacgttacaccggccattaattaacctgttgatttaggacgataaagaataaagtgggcgattaaagcgagacattgataagctagcgctaagagacaaacggcgacccagccaccgaagctccaagcgagggcgccaaagaatgaaccggaagcaccacccatgaaataggcaaacatgaagacggtattgttgcgactactagtggcttcaccaagcatttggacccgggtttgattggcaacctgaccgcactggtttccgacatctaataaaacaatcccgagcattagaatcggcatgaaatgcccccagaataagaataaaagataactgatggtcatcatgaataagccagtggcgataataaagcgaggtgatttagcatcggctaagcgaccgataattggtgcagctaaagcaccagccgcaccaaggattgctaatagaccaacggtaccactaccgagacgataggcgggactggccatatagaaaatgagtgtcgaccagaaaatactaagtgtcccaaacatgaaaaaaccgttgatggcggcttcccgtaacagccgctggtgcgcgataagccctggaattgaactgattgtctgccagtagcttggcccgttttttggacgggaatccttaggtaatttgagggctgccagaaggattaaaagcgcaatcgcaattgtagcgatgagatacacccaacgccaatgaatgtaactactaataatgccgctaaagcttcgggataggagcacacccattagaagaccactgagaatggtgccgagcactgcgccccgtttttgtggttgagcgaggacggctgcatatggaatgatgatttgaggaaccactgaggtgaggccaatcatcaaaccagtcaaggcaaagaaaatgaaattgggtgctaggtaagcggctaataaggatagtaaggataagccaagcatccgtaatatgagctggtaacggctcatcacatcaccaaacgggacaatcagcaacaagccaagtgcataaccgacctgtgtcaacattgcaacagtcccgaccgcaccacttgtaacgtggaaagtggtcgctacgagtgcttgaatcggttggatgtaatatagattggagacggcaacgccggtaataaaagccatcaaaaggattaatggctgcgtaaggactgttttttgcggagcactttctgacatactagggtggacctacctctctgaataacgttcttttagaatttgaagtgcattgtcgaattcaacttgggcttccggttcttcttcacgctttgcggctgtttctagaaagtctaaaatttcaggcgtgacatcgcgcactaattgactgagcgcccaagcagcagtgccgcgaatgacagggcgcggatcagtatcgatgagttcgagtaacttcggaatcgcggtgcggtctttcacgttggcgagtgcgataatcgcattgcgttgaagtggctttttgccacgccacgaaccagcaaggtgtccaaattgaagtttgaactgcttgttactgatggttagcacgggctgtaattcgggcatcacagattctggatctggctccatatcaggatggaagtggaagtcttttcctttattaaacggacatacttgttggcaaatatcacagccgtaaatgacactgcgaatttttggtctgaattcttcgggcatgaaccctttggtttgtgtttgataggataagcaacgcttggcattgaggcgaccatcgcccattaatgcctgtggtggacagtaatcgatgcagcgcgtacagctgccgcattgattggccatcggtgtgtctggttcaaatgggatgttggtaatgatttcaccaagatagacataagaaccgaattcgggtgtaattaataaaccattcaaaccgatgaagcccaacccagcacgttgcgcaacagccacatcgctcagttcgcctgtatcaaccattggcttaaaagtaatttcagtatctgaatcagcaagtgtttcgatagcgctgatcagctggtccatcttatcgcgcagaatatcgtggtagtcaatcccccacgaagcgcgggcaaaactaccgcgtttagcaccagttcgcgctggcttattgatgatttttgttggataggcaagagcaatcgcgataatcgatttaggttggtcgaaaattaaatctggataaaggcgttcttcaagcactttatgttcgaatccagtcgaatgaccatttgctttttgttccttaagacttgcttctaaataatcaaaaggcgctgccgatgtgaaaccaatcttatcgatgccgatggttttgctcgcctcaatcacttgttcttttaaagtgggcattcaaagccacgctccttttttaagtttcatgtgaaacaaatgggttatgctaaataaattttgcgcaggtcagctaagtcgtgttggcttaactggagatcgtgtgataaatagtcttgcaacgaaccattttcggattcaatcgcttgtttggcggtatcgaggtaatcttgatgaaccgttagtaatgactgataactttggaacacagactggttctgtgttttttgttgtagttttgcaagcgattgggtcacgaaagcggcagaagcttgattcgttaataagtaatctgtgcgaatcgtttcttctggaacaccgagtgcactcaacaagaaaacagcgcccatcccagtacgatctttaccagccgtgcagtgaaacagtaaggattggtcctccttatcgtttgctagcaacaagtcgaaaaattgccggtaagcttgcttggagtgatcttggttaattaagtcgacatagacttgaatcatatgttcatgaccactttttggatcagcactgaacgttttaaaaagatcagcttctgatgccgtactagccgtttcatcaattttgaaaacgggtaaggattcatagattgcattggcagggaccttgtctggtgacttggcagtttcttcaggtgagcgaaaatcaacatcatagcgcacgccataatcagttaaataagctaaatcatgtggtgttaggtgggctagactagcggaacgtaagactttatgccatttaagggtccggccgtcttttgtttgatagccgcccaattctctaaagttatggcctttttcaagtggcaaaatgcggtgtgtcatatgcgtcaactccttatccaatgataccaatattgtagcatatttaatgggcaatcaacttaacttgtcagtatgtggggagaaacagtatgataggggtattaagagtggagtgagcagatgattacgtattttgaaatgacacctgagggccagttggttgaaggaacctctgaaaaaagtgccgactggattcattttgaagcaccaactaaacatgagatgcaccatttcgctaaaaaataccacttaccagcggtgttatttgaggtggcccaagatatcaatgaagtcgcacggtatgaaacatttacaacggacaccggtgaagtattgacccatatttgtttactggtaccagttaaaacccatgattcagaagatcatgcggaatatattacgcggcctttttcgttaatcattagtggccagacgttattaactgtggggcatcaacagtccgagctcatcgatgaaatactcacgttagaaggcctggatggtcaaattgaaacggttgctctaaagagtgtttcggccatctatcaacgttatttagcggctttagcggtcgttgcgcaacagattgaacaattggaagaaaatgtacatgtttcgacacgcaatcggttgttgtatgcactcaagtctcttaaaaagagtgttgtctatttggatttagggcttaagagtaaccagcaaattattccgcaaattaaggcaactccattatttgagcgcgtgtcaggacatacagacttactgtatcggattgacttgcagtttgccaagtccgataaggcgattacaacgtatcgtgagttattggcacagttaagtgatttgctttcagatattatttcaaaccgattgaataatattatgaagacactaacatcactctcaattattctaacggttccgacaacgttaggtggtttctgggggatgaacgtaccggtcccgctagccgagagtaagttagggtttctcgtgctattaggattgtcattagccattagcctttgtgtcggttggtggttaaaaaagaaagactacttctaattaaatgttcgcggaagcgcttcgcttttttgcttgaattgtttttccaagcggtatattcttaaagtgtaacaggtgcatatagagaaagtgagatgaacaacatggttcaagaatataaaagaatactcgtcccagttgacggctctgaagaagctgaattagcactaaataaagcagtgtgggttgctaagatgaatcaggcgcgcttggatattttgaacgttttggataccaagcaatttgcagggagttatagtggcatgctttcaggagacgctattttccaaatctctgaagatgcacagaattatctcaacagtttaaaatatgatatccaaaccaatgacggtttgaaagatgtcgagattcatgtgcggtttggtaatcctaagaatgttatcgcacgcgacttcccgacagaatatcaaaccgatttaatcatgatgggctctactggcttgaatgcagttgaacggatgttgatgggttctgtgacagaatatgttaaccgcacagctatctgtgacgtgttaatcgtcaagactgatgttgaaaatcgcccttatcaaaaagcaagtaagaaaaaataaataacaatcccaaaggctaaaaaggatgaattctttttagcctttttgcgtagttcaatttaggaggtggtaataatgacaaaagctgattggatgtatgattcacctgagttattggcgtattaccaaacagagtggggaaaaccggaacatgatgaccaacgcttatttgaactattatgtatggagttgtatcaggctggcttgagttggcggactgtattaaataagcgtgctgcctttcggacagcatttaaagactatgaaattgccaaagtagcgcagatgacaccaaccgaaattgagcagttactgaccaatccggcaattatccgcaatcgtgctaagttgaatgcaacggtcaataatgcacaagccgtccttgcgttacaaaagagtgcaggaagctttgatcagtatctatggggctttgttgatggacagccaattgtaaatcggccccgaacttgggcggatgtccccgcaaaatcagagctatcgatccaaatcagcaaggatttaaaacggcggggctttcaatttgtcggaccagtcgtcatctattcattcttacaaggagctggcgtaattgatgatcatctgatgtcacagtaactttttggtgcagtcagtcgcgctaatattgcggatggtgtattatggagggatagaattcatttagattaattaaaggagtcccacatatgacacaggataatgttcgccaattagcagattggttagaagaaaacatggcagcaattgccgatcgcaaagtgcaattaaatccagaaacaatttttgctgttttggatgattttggcgttttaaataacccggtcgttaagtattttgatattacagaagaaacatattatcaatcagagtcagatcataaattaacgttatcagatgaccacaaattattaatcgatgtgaccgatcggattatggtgacccacgtggatggtgttttagctgaaaacaaagtcaactttgaatacagccacgaagctgtttatgaagatcaatatctcgttaaacgcgatttagaagtgttgacatatggtttggctgtcattggtgcagtggctgcaaccgttaaacataacttaatccaagctgatttgtctaaagatgctgtgttgagtttagctttggctgcgcaaaacatcgctaattggcaagcaaaataatccagtaaaggttggcaagttaaatgggagcagtgctagaattgcgtgatttttcgcaaaaatatcagcggcgacaactttttaaacgtctcaatttacggattgatcggcaagcttgtatcgcgattactgggcaaaacggcgcggggaaaaccacgttgcttaacgtactagcaggattgacgaatattgaacgcgggacactggagattgcaccgaagatgcggattggctatatggctgaacaactcgcaccaaatggactgacacctaagacttatttgcggatgctaggagaattagatcagtttagcaatcgaaatttagaaggtcagattaatgaattagcctatgaatttgggttagcggcggcacttaatacaccgttaaatcaattgtcacgcggtagtctgcaaaaagtgaactttgtgcaggcgattttgcggaccccagatattttattgctagatgaaccgttggctggtcaagatggaacgacccagatgcggatgattcattggttgaaagactaccgccaaaaagggggcgccatcattgtcggcactaacaacgcttttttaatcgaacagttggctactgaaatttatgaactagatgcgatgcggctattgccgattgaagaattaccgcagccggaagaaaaggtgatgcggttagaatttgcaactacaccgcgatcactcgcacttcccgctactttacaacagttagctttaaaaattgttgatggtacgcggtacgtcgtcttgtatgcaaatatcaaaaatagtgatgaattaattcaagcaatgttaaaaagtggctttagcctaagggggttacgttatgaagtcctttagtgcacagttacgtttgcatcagaaaatggtttttgataatgggaatttgtgggggcctttgctattttggatagtggccttattagtcaattatgcggtgcaaccacaagatttcgtcggcagcctcgctacattattaatgacactgtttatcttattgacgtggttgacctacagttacatcaatcaatttccccttcaaatggaaaaacttttaattttaaaattaaagaagcaacgccgtttttatctcagtttaattagctatctcatcttgttgggattattctttgtcctaattgggatgggaagcttggcaattacttacgtgctcaatgggcaccacgcttttggtcgaggacttagctggtgggattggctaggcgggaccttaatgttgacgagtattttacctgtttcagtaatgaccggtttgttctggcaacggcgaattttagtgaatcgccggatggccggtacgttgaccatcttgatggtggttctcggcagtttaggtgaagcgattgtcaattactggcatccctacctctatattctggggattttgccacccgtttcgaccatggcgcaactcttcaacacgttgggacacatttcgctagttgatattttattatcatgggcaatgagtcttggttatagcttggtcttattattgattgatcaattaattttaagaaggcgtaaattcctattttaagaagctgacaggctgctataagcggtttgacagcttctttttaagttgaattaagcggttacgggtgaaaaaatcttaaaaatgtggcatgattaaaaagaattcaaatcataaaaggagcttttataatctatgacaaaaattgcaatcgctggctcaggcgcaatgggcagtcgttttggttacatgttacaatcagctggaaatgatgttgtgttacttgataattgggcagaacacgttcaagcaatcaataccaatggcctgacggttgtagaagcggggcacgaacccgttcaggttcgaattccggctgctttgccaacggatattaaagaagttcaagacgtcattattttattcacaaaatcgatgcagctagtcgacatgttacaagccatcaaacccttaatcggtgctaagacaaaagtagtctgtttattgaacggtctcgggcatcccgaaacgattgaacaatacctgcccaaagaaaatatttttgtcggcattacactttggacggcggggttaacgggaccaggtgcgattacattaacaggctctgggaatgtcgaattacaaaatgttgatccagatggcaaagaatcggcacaagcattagttgccttgttgagtgcggctggcttaaatgcgcaatatagttcagatgtactcttttcaatctggcgtaaagcctgcgttaatgggacactgaacagcttgtgtgccttgttagactgtaatattgcacaattgggtcaaaccccacaagcgcaacaactcttgcgttcaattgtggcggaattctcagcggttgctgcaacagaagccgttgaattagacattcccacgacgattgcccacatcagcaagatgtttgcaccagaacaagcaggtggtcattatccttcaatgcaccaggatttagtgcaacatcaccgcttaaccgaagtggattacttaaatggttacgtggcacgcaaaggcgccgaaaagcacattgcgaccccagtcaaccaattaatcacggaattaattcatgccaaagaagcattattgattaaataaacgaggagtcttaactaatgacagaaaaacgccaattaaatatcgaagttgaatcaatgcactatcaaaaattattaattgctatcgatgatgatgacacaacctcatccaaacgggcctttaactatgcttgtacgcttgctaacgcctatcaaattccattagggattgtcagcattttggaaaccggcgatttgaacatttatcaatcactctcaccaaacgtggttgaagggcgccgagaagaaatcgcagccgatctagatgtttatgttcaaaaagcgaaagaattcggggttgaagatgtgacgccgattttaaatgaaggtaatccaggacacgtgattgttgaagaagtgattcctagtttccaaccagacttggtcatctgtggttcaaagacgaaaccatctaaacatttaatcgggacacatgcgagctatttagcgaaatacgcgccatgttcagtcacagttgtacggtaaattaagtatttggagatcagacgaatgatagaatgtacacaatgccatattaaatatgggcgtaaattgcaccaatgtcccaattgcggtctagtgcaccaatcaacgcaaacaaaacagcaaacatcgctcctgcaacaatactatcaatttttagcgcggagtttaaaacaaccgctaaaggtgcaatggcagtgggccaacctgtggtttggcttagtcacgtttggtctggttatattaatgaatactgcaacggcaagtttgctcattgccagttggtcagaacaaattggtgcggttgctggggtgatggcgtcacaaattgtcttgcgccaacggctaaacttattaccgcttgatatgaaggcactcggtggacaactatttattctggtggttgttttgggaatcggatttttactcaagcgttacttattgaagaagacgacaaccaccttgcgcgcgtatctaacggagattagtgcgtacagtgggataaccgttattttagcattagctgcgctgttggctgctctatgtttcgggatgaccgccatctggttcgtcttaatcatggttgcagtgatgtacgtcagtttgaacattgcggttgggattagtttatttcaaactcgatgggcagcttttgatcgcgtctatgctattttattatttgaaatcttaacccatgttgtcttggcaattggcattagccaaatcgtgattttaaacctactaacaggactctaaaaaataaaagtgcgtattttggtacactttttcaaaagaggtttatcattagagttgtaaaaaagaaatgggaggtttttaatatggcagcagctgttgaaaaaacattggttttagatatgaagatgtcagaagcatttgattggagtgacgataacacaatcgtccgtgatgctttgtgggatcactatatggaagccaacggccggaacacggataaaaccgttgaggcaatgaaaccctatcttaagatgagcgacgcggaagttagagaaaaggcagaagcgcttttaaaataaggcaataaaaaaagacccgctaatcattgttgattacctatgtttaggggtggcctttttttagttggcgcgtaaagtttgattctgagtggtgtagcccagtttctgatagagggccaacgcagccggattattccctaacacggttagttctaaataatcgagcgcttgtgtttgttgccattgctttgcggacgatagcagttgtgtagcgacgtggtggcggcgtgcctctggtgcaacatacagtgttgtgagataagcaaagcggtgtgcgataaacaagggtgagggacttgtttgggctgttgtaacgtgacaaaaggcatcgatttgcgcatcttggttttgatgaacaaagactgcttgtagtggatcagttatcatttgttgccagtcaaagaactcaggcgtgtaatcagcttggtaattagtgggttgtagcacatgcatttcagtcgttaattgttgatacagggtggttaatttggcaatatcagttagtttagcggggataatgggcatgtaatcgtctccaaagtaaaattttaattgacttcaatcatcgtttctcttatactaatgtacgtggcttaaagtgataaagcaagttacgcgggtgtggcggaatggcagacgcgcaagattaaggatcttgtcgggaattttcccggtggaagttcgagtcttctcacccgcatcataattcagttaggtaattccaattggaattacctttttttgtcccttgatgtaaatgattgaaactagggtgacaaatcgctataatgagcaataaattcagtttaggagtcagttaggatgacacataaaaattcatcagcttatacgattagtattatggcgattttaaccgcttttttaatcattcaaagttttattccgatggtcggttatattaatatcattcctgggctaccagccgtaacaacaattcatttaacggtcattattggggccgtgatcctgggcacacgccaaggggcgattctaggattaatttggggtttgatttcattatttagagcctatacctctccaggcgatccgctttcacttttaatctttcaaaatccaattatcgctattttaccgcggttgatggctgggatgattgctggctttacgttccaacacttatatcaaactaaaattcgtaaaaccggtgcaatggctttagctgggattttcggggctttaatcaataccattttagtgattggcttaacgcgtgtgctttacggacaccaagcggcagggatgtatcatactgatccgacccatttaatcatcgtgatgcttggcgttgttgcgttaaatgctgtaatggaagcaaccttagcagctgtggtgacaccactagtcgcaacaccactcatgcggtttaaacggacgcaataacaagtgcgggtagctacagccgacgattgtggtccgccacgggttgaataattaaagattgaaaaaaggagttggacaaacgtgactttgtccaactccttttttgtttattccagttgtttttgcactttcttagcatgcgcagcaactgtgttcatgttgaccttagcaatttcggcttgttgataaactgaactgtaatattgatttaaacgattgattggtgatttaagactgtcttcgtctgcatcagcatctgtatggtcgctgtaaaattcatcagatgctttagtggccgcgttgtagaaggtggccaaggttgtataatcaagtgtcgaaatcttaagactttgatttaaatctttgacttgttcaatcggcaattcatcgttttcttgcttgaccagtttggtgaggcgtttaatgaccggtttgagcacagcttgttgttctttaagactttgaaaggctgcttcgcgcttggccgcagtcgtcgcaatcttagtatcttcaatcgttaatagattttcgtcgggatattttttttgaatcgtgagatagttatcaggaactggatcgccgattgtttcgagggttgaaagagctgttcgttgttgcttagtcgcatcttcaacggtttgcatatcggcttggagttgatgtttagtatccatcggtttttggcaagcggctaggctcaccccgatgaagataattggtaatagccgtttcaatagttttagcataagcaagcactccaatgagaaaaagttatactgctatcttaacgtaattaaagcaaaaagccaaatcatttggggcatgattcaacatataaaataacacttgtctaaaaacacggatgctgattgtccgtgatagaaaacggtttatttttattgccaaatggttgccaatggttgttgcctgtgttacactatgtttgtactttttgaatggttgcggtacgaatgtttccaaaagaactttcttccatcggaccaccagaaatacacaaatttataatgtgtcatcgacacaaggaggatttttctcatggaaaacggaactgtaaaatggtttaacgcagaaaaaggttacggctttgtaactcgcgaagatggtagtgatgtattcgtacatttctcagctatccaaggtgaaggctacaagactcttgaagaaggtcaaagcgtttctttcgatatcgaagaaagcgaccgcggcccacaagctgttaacgtaaacaaaaactaatttaaaaattaacctaggggtcgcggcaaaagcaattttgtcgcgaccccttttttgattgggtggtgagctggagatgttaacgtatcaattgattgagggcgcagcacggcgacagtggctggatgatctattgttagcggatgaagaagtcggcatgattgaacgctatttgatgcatgggcaattttacaccgtaagcgatcagcagcaagtcatcggggtcttccatctgatggcactcaacaatcagcaggtagaacttaaaaatattgcggtacggccagaatggcagcatcgaggattcggtgggcaaatgatgactcaaattcagacgattgcaattgaccaagggtttcaatcattgctagttggcactggggacggcagtttggcagcaattggtttttatttgcgtcaaggctttcggttcgaacaaattcgcaaaaacttcttcgaccaatatcaaacgccaatctatgaaaatgggattcgcctaaaagatatggtggttctcgctaaaatactctaaaaaaacctgaccaaattggccaggttttttgaatggattaatcgagatcagtgcgtttttcaaatggatagacaaagccccattcagcacgtgcgtctgacatgatgtccatgacatcgcttgataattcgagggtatcgtttgattgatttccgcgcactgtttcttggaaatcatggagttcatagttcattgcgttggttgcgtcacccgcttgaatggtctcaacgcgaccatctgggaaagtgagggtggctttgtcaggccgtggataatcgtcaacggtgacatagccattttcataaacgagaacaccttgtttaggcatcttcgcatgaatgtttaaggtaacagtcaccatttcatgcttggcattatttaaaagtaatgttgattgctgatcaacaccggattctgatggcacccattgcgtcgctacaagttctggtttagcagttaacatccgacgtgcaaatgagagggcataaacaccaatatcaagcattgcaccgccggcaagtgcgggactgaagaagcgattgtttggatcaagctctttataacttccaaaagagacttgaattgattttaaagcgcccaagtgattagcgacttgttggcgttcaatctcagcaaacaatggcatgtgataaatggtcattgcttcagctaatatcaagtgcttttcgttagcaagagcctttgctgcattgagttcgcggcggttcatcgtaatcgctttttcacagaagacgtgtttaccggcttcaagactcgccataatgctttcgaagtgataattgtggggggttgcaatgtagacgatgtcgatgttgtcatcagcgagcatgtcggcataactaccaaatgcatgtggaatattgtattggtcggcaaaggcttgtgccttatcgagtgaacgagaagcagccccataaatgtgaccatcaggttggttaaaataagttgcgaaactattggcgatattgcctaagccgataattccccagttaagcgttgtcaataaaatcagtcctttactatcgtaatcggttacagccaatattatagcaataaaagcgctaaatagaaattaaaggggggttacaaattaaagattggtgttctgaatgaatttgtgtacaatatagaatagattcagataaagttgaggcagaggattggcaaaaaaacgtaaacgcaagacgacaaaacgcaaaccaacagctaactactactctaagaagagacgccacccaaccgattggctagtggtcgttttagtgagtctatttattctcggaattgggctcgttttattagttcggtataatggacaaaaggcccaagaagaacttgccgatcaagccagacaggaacaacaatcgcgccaagctaagaagcaagtgtttattaaaaaaatggtgccatatgcccaagaattacagacgaaatatcatgttttaccaagtattactttagcgcaagctattttagaaagtgattgggggaagagctcacttgctgcgcaataccataattatttcggtattaagggtgataatgaggccaacaccaaggaaatgacgaccaaggaatatttaaatggtcagtgggtaacgacaacagcgcgttttagagtatataacaattatcaagaatcgatgcttgaccatgtacaattgtttgcttatgggacctcttggaaccggacgcagtatgcacacgtaatcgcggccactaattatgagcaagctgcccatgctttacaacaagacggctatgcgactgaccctgattatccagcgaagttaattgagctcgttaaggcttaccacctcgaccaatatgattaataaagaatgctatgaaacaaatcatgggaaatctgctactaattaatctcaaaagagattgccacaaattccggtttgtgacaggctcttttcaaatcgctgaataactggatttgagcttgttgtgttgctttttttgtggtaatctatttttaattcaatttcagaaaacattattagtcgttactactatcggtagtgatgtttaacgatgctacaaaggagagctcagcgtgcgactattagaggaacgcattaaaaaagatggtcaagtattaggtcaagacgtattgaaggtcgataacttcttaaatcaccaagtggatccagatttaatggctgcaatgggtgaagaattccaacgcttatttaaggataagaagattactaaaatcctaacggttgaatcatctggcattgcgcccgctgttttcgcgggcttagcattccacgttcccattgtttttgcaagaaagcacaagagtttgacgttacaagataacatgtacagtgcaacggtttattcatatacgaagaaagtgaataaccacatttcaatttcgaagaagtttctgaatgcagacgatcgcgttttagtgattgatgatttcttagccaacgggcaagcggttgaaggcttactttctattattgaagaagccggcgcacaacttgaaggtgtcgggattgtcatcgaaaagactttccaaaaaggtcgcgaattgttagatcaacgcggcattcaagtggaatctttagcacgaattgcagcgtttgaagacggtcaagtcgtctttttagacgaaaataaataaatgttatttaacggagtgctgagaggcactctttttttgtctaaaaatttgttatcatggaggaaagtattaggcagacaacgcttaaattcgctataataagggtatacagtttggtgaacaggaaagcaggtaatatgatgccagttatttatccaggacaaaccatcggaattattggaaatgatcaacgggcctatatgttggcgctcaaagcaaaagaaatggggtatcgggtagccgcgattgtgaccccgcagatgcaaaatacctcatttgcacgtttaattgatagtcagatcgatggtgaattcaatgattatcaaacattagtccaactcggtgaagtcagtcaagtgttgacctatacgaatgaattattagatgagacagtgctcgaacaactggcacaacattattatctacctcaaggcagtaatgtgttgtctgtgacgcaagatcggtacctcgaaaaagtctttttgagtgatttaaatatcaatattccgccctatgcgacagttgttgatgtagatgatattcaagatgcaatcgattcaatcggatatccatgtatcttaaaacccattcaaaaaggttacggtaagcagtatcaacgttttattcaacaaccgagtgaccttgaaaacattgaagctgcccttgagttggggacttatattttggaatcttggattcccgacgcacaagaactatcagtgatggtcgttaaaactgaagatggtaagtgtgtgacactgccagtcatcgaaaatgagtttgaagatcatcgcttgaaaatgtcgcttgtgccagcacggattaatcaagatgttgcgactgaaattaatcgattagcccacttaattggggaaaaattagactatacaggtgtttttggggttgaattctttttaacacccgctatgaatatttatgtgaaacgaattatgccaacaccgcacgcaacgggcgatgtcttgacacataccttgaatttctcgcaatatgaatatcatttgaaggccatctgtcagttggcagtcggcccatcacgcctcaataatgcggggatgaccttagggattcaagaagcacaacggtcattaattcaaacacagatgaagatcaaaccggattggtactttaatttgcacaacgtcacgaccaatcaacagattggatcggtcacagcaaccggacaagccatccaacccttaatcgataattacgaagcggcagacttatattagagtgcgacagcgggcggttatcttttgaggactagcataggccggcgaatgagcgacgcagtcgatcgttggacggacgtagctagccgcagaaagatgcccgatggagcacgtttcaaaacagagtgcatttgtggcggttatcttttgagcattaactggatttgacgagttggtgatgcaatcgcgaatttggcaaatttggttaagcacagaaagatgccacaaaaagcacgttttaccatcaccagcatttaggtagtatttggaggagaagtttatgttagaacgttatacacgtcccgaaatgggcgccatttggacaacggaaaatcggtatcaagcttggttggaagttgaaattctagctgtcgaagcgtgggcaaaattaggcgatattcccacagaggatgcgcagaaaattcgcgcgaatgctagctttgatttggcagaagtcaatcgcttagaagccatcacacaccatgatgtggtcgcattcacccgtgccgtttcagaatccttagcggatgaaaaaaagtgggtccactatggtctaacttcaacggacgttgttgatacagcacaagggtatattttgaaacaagcgaacgatttaatccgggctgatatcgccaattttatggctgttctaaaagataaagcttacgaataccaaaataccgtgatgattgggcggacgcatggcgtgcatgctgaaccaacgacgtttgggttaaaactagcaacctggtatgctgaaatgaaacgcaatcaagaccgttttgaacgcgcagcaaaaggcgttgaagccggtaaaatcagtggtgcagttgggactttcgccaatattccgcctgaaattgaagcctatgtgacagaacacttagggatccgggcccaagatatttcaacgcaagtgctcccacgagatctacatgctgattacattaacacgatggcggtcgtggcgacctcaatcgaacattttgcgactgaaatccggcatttacaacgaacagaagtccgcgaagtggaagaattctttgctaaaggtcaaaaaggttcatcagcgatgccgcataaacgcaatccaattagttctgaaaacgttagtggcttagcccgtgtgattcgcggtcatgtgattaccgggatggaagatgtgtcattatggcacgaacgcgatatctcacatagctcagctgaacggattattttacccgatactacgattttattggactacatcttgaatcgcttcacgcggattgtgaagacgttgacggtcttccctgaaaagatgaaggctgacatgaacatcacccatggtttaatttacagccaacgtgtcttgttgaagttagtggatgcgggtctgagccgtgaagcagcctatgatttggtccaaccgaagacagccttagcatgggatgaacaaaaagatttccgccaattattagaagccgatccgaaagtgacgagtgaactttcaaaagccgatttagacgacgcctttgattaccaatggcacttaaaacaagttcaaacaatttttgatcgggtgtttgcataagcatccgacataaaaagccaccttagcctaaaagttaggttaaggtggcttttttatggcaaaataaattctgattcgaaacgacaaacttggtgatggttactgagggcgacttcaaacgctttttgccctagggtgaagaagtgatggtcaattgttggcagttgcaataaaaaactggataattgtttttcttgaccaattaaaagcggggtcggcagttgatgattcagatgatattggcggacaccagcggcaatgtcgtcgccatttgtaaaatagcaagcgagggttggctgtttttcaaccagttgttcagcggcacgatagccatcttcaaatgaacgcatgccaccgaccattaactcggaatcaggttggcagttgaaaacttgttgataagcgttcgtgacggcaatccaggtcgggctttgcgctaaattacgacttaatagtagaccaatttgctgtgctttgtgggctttaaggtacttgaatgccgctaaataggcgggctcacggtgagaataaacggccgagatatgatgggtccccgggtcttcacaacagacaatttgaccataacgcgtgtactctgctaagactgagagtgcaataccatgtgaagtaaaaatgagtgcggtaaaattcttacgttttaattgttcgagataatctagttcgactgcttgattatattcggaaggtaggagcacaacgtgatagccgcttgaaaacgcagcatccataatcccgtttaagagttggttgaaatacggatggtcattgtgcggtaggacgaccccaatatttttattttgaccgaagcttaaatcgcgcgctaagctattaggcacgtaatcgagttgtttaatgaccgcttcgattgccgttttggcaggttcagagacgtatttttgatgatttaacacacgggagacggtcgaaaccgaatagccgcttttgcgggcaatatcacgaattgttggcataatcctaacctactttttgattaactttagtaatgtatttctttagaccatagctgaagccactgtgatgattagtcttcgtaatgaattgacccgccatctggatttgatcactggcattgcccatgacgatggggtggccaactagcgataacatggctaagtcgttttgaccttcaccaaacgcggcgcaatcagcgactgttagtccagtgttttctaagatggtggttaatgcgttagctttagtggcttcatgactcgtaatttctaaggtcattgtacctgattgttgtactgaaagaccaggcaagtggcattggttgatgaaatcagcaacagttgcccgttgttgtgtcgtttgcataatcagttgaattttgaaaagcttgagaaatggattttgcaattgatcactaaaattgatgagcgtcggcaattgaccggtttgcttagcgattgcctcaataccagcgtcaattgtctgcgtgtaccagtggtgtaagtcatacgcacttaaactgatgtcactaaattcagattgtaatgcggcaattaatgttgcgacagcagaggttgcaagtggatattctgctaaaaccattgggaaaagatctgtcggttgataaattaaccccccgttaaaagcgacttggggtgtcgttaacgctaactgatcaatcgtagcttgcatttcttgtggtgaacacgcagaaatcaaggaaattgggagtgggcttgctttgacagccgcaatatctttttcagaaagctgtccgtcttggtttaacaatgtaccgtctaagttagaaaaaatgtatttaatcatgatgcataccacctttcttggattaaggtgagtataatttatgaaacgcgtcccaggtcaaggcagaagattgcgaaaaattagaatccgttttactaggtcgtgttcgcttttttctacctatctagtttggtataatataggctgattgcatttacggaaggatgactaatttgtctgaaaaagaattgttacaagggatgaacgataagcaagctgaagcggtcctcacaacagaaggcccacttttaatcatggcgggtgctggtagtgggaagacccgggtgttaacgcatcgggtcgcttatttaattgaagaaaagcacgttttaccatggcgcgtgctggcgattacgtttacgaataaagcggcgcgtgaaatgcgtgaacgggtcggtaacttactcggcgaaggggctcaagatgtttgggtatctaccttccatgccctttgtgtgcggattttacgtcgggagattgaacaaattggctacaatcgcgcgtttacaatcgcggatccttctgaacaattgacgttaatgcgccatgtttgtcgggatttaaacatcgacacgaagaagtttgaaccaaaggcgattttaggcacgattagtaacgccaaaaatgaactccaaacaccaagcgactatgcgggtctagcaaacggaccattcgaaaaaattgtggcccaatgctacaccgaatatcaaaaacgactccaacaaaatcaagcgctcgatttcgatgatttaatcatgcaaacgatccgcttatttaaagaaaacaaaccaacgcttgaacactatcaagaaaaattccaatacatccacgttgatgaataccaagataccaatgaagcgcaatacacattggttaacatgttagctgataaatacaagaatctctgtgttgttggggatgccgatcagagtatttatggttggcggggcgctaacatggacaacatcatgaacttcgaacatgattatccagatgctaaatcagtgatgttggaacaaaattaccgttcaaccaaaacgattctagaagcagccaacggtgtgattaacaataatcaatatcgtaaacctaaggaattgtggactgaaaataacgaaggacaaccaattacttattatcggggtcaaagtgaacgtgacgaagcactctttgtcattacgaagatccaagaagaaatgcaaaagaaccaacgtaaattcggcgactttgccgttttataccggacaaatgcccaatcacggtcaattgaagaagcgtttgtcaaagccaacatgccatacaagatggtcggcgggcataagttctacgatcgtaaagaaatcaaggatatcttggcttacttacgcctagtcgtgaatgcgtctgattcaatgagttttgaacgggttgttaacagtccgaaacggggaattggccccggcactctcgaaaaattaacgcaattcgcggatgatcatcaatggtcattacttgaagcagcgcaaaatgcggaactctcaaccattccaggtaagagtcgcaagacgttgatcgattttggcaacgtcattggtgacttagcgaagatgcgcgaatttttaaacgtgacggaattaacggaacaattattggataagactggctacaaaaaagcgctcgaagttgaaaacaccctcgaagcgcaaagtcgtttagaaaatattgaagaattactctcagttaccaaacaattcgacgaacattatgaaccagaagaagatgacagtgatttatttgtggacttcttggccgaattatcattggtctctgatttagattcagtcgaagaagaagccagtgaagtgaccatgatgaccttgcatgctgccaaagggcttgaatttccagtcgttttcttgatggggatggaagaaggcatcttcccactatcacgtgctttattagaagaagacgaactagaagaagaacgccgtttggcatatgttgggattacccgtgctgaaagcaaattgtacttaaccaacgcttattcacggatgttatacggccgtcaacaaagtaaccaagcgtcccgatttgtcggcgaaatcgatgataaattattggattacgcaaatggcaatgctggcagtattccagaacgcaatgtgccatttggtaagagcaatcgttatgcacgcgcaacggctacaacgtataatgcaaataaaacaacgacgagtcacaagattgccgacacaactggcggcgataacagcggtgcttggacagccggccaaaaagtccaacacaagaagtggggcattggcacagttgtcaaggtcaacgggaccggcaacgaccaagaactagatatcgccttcaaagaacaaggcgttaaaagactactagcaagcttcgcaccaattgaaaaagtagaatagagtgcgtttccgacggttatcttctgaggattagcacaactcggcgaataactgctgcaagcagttgtttgacgagtagcgctaagcggaagttgttgcaaccaaaaagcacgtttcaaaacagagtgtgtttaaagcggatttgactctgagcattagcacagtgttgtgaatgaccgacaaagtcggtcgtttgcaatacgaagctaagcacaagagtcagctttaaaaagcacgtttcaaatcataaacagtgaggagtcttcattatgggattagctaaaccgatcgatcaatatacgcaaactgaagcggcagcggcggcccaagaactccgccagacattagctgaatacagcgaagcctattacacaaaggacgccccagtggttgaagatcacgtgtacgatgaattgtatcgcgacttagaaacgttagaagcggcctttccaatcattgttactaatgactcgcccactcaaaaagtcggtgatcaagttctgcctggctttaagaaagtgacgcatgaagtaccgatgttatcaatgggcgatgttttttctgaggaagaactcgcgacttttgataatcgacttcaaaaaaacgttgagcatgccatcgaatataatgtcgaattaaaaattgatggactcgcgattgacttgatctatgaaaaagggcaatttgtccgtggtgcgacgcgaggcaatgggacgattggggaggacattacccagaatcttaagaccatcaaggcgattccgcaaacattaaccaagccagtctctattgaggtccgtggtgaatgttacatgcccaaagcctcttttgcggcattaaatgaaaaacgggaagcagaaggccaaccgccatttgcaaacccgcggaatgcggctgctggtagtttacggcaattagatgccaaaatagcggctgagcggaatttgagtgcctttatgtacacgattgtcacctttgacgatgtgcaagcgacaacccagcacgaagcgcttgaagtgcttgcagaactcggctttaacgtcaatccaaccgctgaagtttgtcataatatgacagaggtaaagacctttatcgagcgctatcaagcaacgcgggatgacttagaatacggcatcgatggggttgtgttaaaagttaacgacttagctttacaacgccaactcggtaatacggttaaagtgccacggtgggagattgcttataaattcccgcctgaagaagcggcaaccattgttcgtgacatcgaatggacaattggtcggacaggggttgtcacgccaaccgctgtgatggatcctgtccagttggctggtacaacagtcgcgcgcgcctcattgcataacgctgatatgttacgtgataaagatgtccgtttgttggacacggttttattacacaaagcgggcgacatcattccagaaatttcacaagtagtactggctaaacggccggctgacagtcaaccgtatgtgattccgacagaatgtccttcgtgtggtcatgaattggttcatttggatgaagaagttgcattgcggtgtattaacccaatgtgtccggcacaagtgaaggaacagttaacgcattttgcttccagaaatgcgatgaatattgacggcttaggtccacggattattgcccaattattggatcaaggattggtccatgatgttgccgatttataccgcttaacggccgatcaacttgcgcaactggataagtttaaagaaaaatctattaataatttgttaaatgcaattgaagctagtcgccagaattcgctagaaaggttattatttggattagggattcgccatgttggtgccaaagcagcccgtttattagcggaacatttcttgacgatggaggctttgatggccagtgatcaagaagaaattatgtcggttgatacgattggcgagacgattgcggatagcttagcgacttattttgctgatgatcaagtacaaactttaattcgtgaattggctgaagtgcaagtcaacctgacctatactggggtgacaaaggcacaagctgaaaatagtgatagttactttaacggaaaaacggttgtcttgaccggtaaactatcgcaatatacccgcggtgagttgaaacaacaacttgaagataacggcgctaaagtgaccggctcagtttcgaaaaaaacagatattttgattgctggagaagatgccggcagtaaattaaccaaggcgcaagcattggagattccaattatcaacgaagcagacctagatagttatttggcgcaataagcgaatcaattaggacttataaggaggccattttcagtggcaaagtataaattatgggtagttgcagccgcaacggttttattgttggcaggttgtacaagtttacaaagcaattcgagttcgtcatcatcaactaagtcgactaaaaagctacaaacgaccgggaaagtgactgacagcatgtatgaaggggttattgataataaccaatacaagacaagtcagacacgtggattaaccacacaacaaagtaacacggcatttgatgtgaagagtttggaaagtggcttattaaacatttctaaaaaacaattccctactgataaatacctctaccaagaaggtcaaaccatcaaaacggcggaagcgcaaaaatggttggcacgtcaatcaaaagataatacacttggcttaaatccagaagataatggtgaaaaagaaccggataagcggaatccactgtatctccaacaaatcttagaacaagacttcttaggggcagatggtgcgcttgaagggatgagtattggtcttgggatgaatcaagtggattactataccaaggaacaatatggtgctacttttgaaaccaaaatttctagtgccatgatggcgcaacaaggtaaacaaatggccaataaggtcttaacgcgtttacggcagaaaaaaggtttgagtaagacaaccatcgtggtggggctttacaaacaagcacctaaggatagtttagtgggcggaaccttcttcgcttatggggtcagcaaaaacggtagtacaacgattgattcatggcacaaaatgaaccaagccaaccaagttttcccactcgttaatgatgaaaaagcggtcaatcaaagtgatgcggacgcgtttaccagttttaaagaacaagtccaaaccttcttcccgaacttgagtggtgtcacggctcaagcacactatgaagatggtgtattggctgggatgaacatcaccgttaatacacaattctacagtgaaacagaaatcatgagtttcacacaatacattgcaaccgctgctgataaatatttaccacaaaatattccattagatatttcaatctcgtctgcagaggggatgcaagcttacgtaggccgagcagccggcagtaaaaggttctcaacccacgtattcgggagttattaattaaagagtgcgacaacagtcagttatgactgataggcaaaaaaatagcgtcgacaactaacgcagttgtcgacgctatttttttggacctttaaaagtcagtggttgtaattttaaaaataacagtgtacaatatgcggtattgttgttattttatttattacaccaaaggagagcatcatgaacgagtttaaaacagcacggaattggctagacaatgcggatgccgtcattattagtgctggtaatgggctatcaattacggaaggttacaatatttttgcacacgacgaagcgtttatgacccactttgggactttttatgaacgctacgggattatgaatattcttcaaggggctttttacaactatccaacagtggctgaaagagatgcattttacaaagtattgttcgattatatggttgatcactatgaaagtacacctgtctttcgcgatttaaagcagttggtgggcgatcatgaatactttgttgtcacatcaaatggcgacatgcattttcaactgagtggatttgacgaagaacggatttttgaagtggaaggtaattttggtaacaatcaaaatccaatgccgatgattcaaaagcaacaagctaagtttaacgcatttgttcaaaagtatcgttcacaaaacgtggtgattctggaattaggaattggtgctaataatcagttaattaaggcgctcctcatgcaattggtggcgcaaagtctaagttaccgttacatcacgttgaatttaccgcacgaaatcaatattcccgcagccattgaacaacggtcaatcggtcttgctggatcaatcgatgatcattttaaggagctcctcaaaaatgactaatttagactatcaagcaacactacaaaaaatggcaacgacgctcaaagaggcagattacgtcatcgtgggagccgcagccggcatgtcggctgcggctggtcccgattggtataatcccggcgatttatggggctttaagctgtctttaattcattttgttttacatgaaccagtttaccaaccgtatcaggacttgaaagccattttaaaggataaagactatgatttgataacgacgaatcaagacgtgcaattctcgaaagcttttccagataaagatgtcgccacgattcagggtgactggtcctattttcaatgtgccgataaatgtcatgatcaagtctatcctaatcagacagttgttgaccaattatttccgcaaattgaaaatggccatttacccgaaaacttaattccgcggtgccctaaatgtggtgctgaaatgttggaatgggtccgtggttatgaattccttgaaggacaacactacaacaagcaatacgcaaagtatcgtcaatttattcaaaaagctgaaggtaaaaaaacggtctacttagaactaggtgtgggtatgatgacaccgatgtttattaaggaaccgtttatgaatctgacgtaccaaaatccacaagcaacatatatcaccgttaatcccaaagatgcgattgtgccacgtgaattaatggaccgcggtattgcagttaagtatgacttagtaaaggtactagcaaatctaaaagagtgcggcatcagccggatatcctaaaaaaacctaaatcaaaaaattagagaacagacctctaattttcataatttaggttttttggatggatgcattattaattattttctaaatctgtcttaatttgggtagtagaaataccacttgttctagggaggtagataacttcacagtaactctttaaaaagtcgaattttcctgcccaatcatcacccataacaaaaatatcaatatcgtacttttggacatcttcaattttttgattccaatcactttcagggatgacttgatcaacataacgaatagcttctaagatatatttccgatgttcgtaactatgataagattctttatgtttgatagcgttaaattcgtcggttgaaagaccaacgattagttcgtcacctagcgatttagcgcgttccaagagtcggatatgaccccaatgtagtaaatcaaaagtaccatacgttaaaattcgtgtcattagaaatctcctcgttagtagtaatggtaaaagcatagttgattttatatacgaattcaagtaaatagtaacttttattaaaaatatgaaataagataacgaagttttataatatttgctataattaggaacatatcaatagaatgggatgagtggtgcttgtgttgaaaaataaactttttacattatacataaaaattttaagtactcttttaaagttaatacctgtaaaaaaaggtagaatatgcattctgaatggttcgggatactcaggctcaaatggcttagctatgtacaaatatttaaaagaggaacaagattatgaagatgtatggttgattgaaaactttccaagcagccacttaccatttaaagtatggttcaaaattgcctcggcagaagtaattttaggaacgcatgatccgtataaggtttcaaaaaaacaggcctatattcaactatggcatggtgtacctttaaaaagaatgggtttcttagctaaaaatattgagaaaagttcaatagaagtcagccataagcactggggtaaaacagttaattatatcacttcatcttcagatacttatgatactttaatgagtgcgtgtgaggggataactaatgataagtttattcatctcggctttccaagaaatgacttttttaatattgatgaagccaaaaaaacaagacgccgacaagaacttgaacgtttatttgaaccaataattatagaaaataagccacgaatcttattttatttaccaacatttagaatggaagataacaatgagctgttatcagaaatgttaaaagctggtaatattttcggcttgtctgattttgatcaagacgattttgaagcggtccttgaacgagagaatatcattattgtagctaagttacatcctgttgaagagaaaaaagttaataccgaagcgttaaataagctaaagcatatgaaaattatcgatggcgattggttacgagggaacgagcacgatttatatgaatatttagctgtaactgatgctttaattacagattattcaagtgtttactttgactacctattaatgaacaagccattattatttttagttaatgatttacaaaactataacacaaatcggggtttcttattgaatccctatagaacttttgcacctgggttagttgctgaagattggcatacctttgagagggcacttatacaagtattcagagtgaatttacaagatgagcgtaatcgtgtaaaagaaatcatttatcaagatgaatacttagaaagcagtgcctctgagcaaatctgggaacaactgattcaaaaattaatttaagatagtaaataatgaggttgaaatgcgaaaattatttaaagatttcttttataatgcaatctatcaggttttcttagtaattatccccttaattacagcaccatacttatctcgagtgctaggtccggggccactagggattaacagttcggttaattttacaattcaatttattatggtattttgtgcatccgcaatgggacaaattgggacaagaacgattgctagagcgcgggcagcgaagaatcagtcagagtttgaatctgcattttgggggttatggttaattcaagtaactcttagtgcaataacaatcgttttattcattacagtttgtttagtttttaaaccaaagtattatatttatttcttattacaattaccatttcttttaggcacaatgatagatatttcgtggttcttccaaggaatcgctgaatttggaaaggttgttgtccgtaatacaattattaaattatttagtgtggtcttaatttttatttttgtccatcgtccagaggatttaggattgtacatgctgataatgtctatgggtaatctattaggaaattcagtattttggttacaaatacgaaaatatgtcccacacttcgtaggacactactaccattttaaagcttctattgttatgattgcgacgttaatattgccacagatagcaactcaagtgtacacttctttagataaaccaattttgggattgtttcacagtacaacgcaagtttcatattatgaccaatcgcagcgaattgcgaatattattttaggggtaattacatcgattactattgttatgatgcctaagatggctgccagttcggaaaaaaatcaacaattatttctaaaaaaatcttatgaaacgacacttgctttaggcttagcgttcatgataacggtaatgtgtaacacaaatcagtttgtgccgtggttctttggagagaaatttattccaatggaacatttaatgtttctaatcagcttttcgattattcttattccaatcggtggtgttttttcgaatcagtttgcattggcaattcgaaaagataaagaatttgcaattccgttactaattggggctattttgagtttgattttaaactttacaatagatcctattctcggtgcgcttggcgcgacgattaatattctgacagttgaagcagttgtttgcttattacgaatctggatcgtcagggagtattacgatgcgcgttatattttcaaagatacaccgaagtattttattcttgcagcaataacttttattatcggattcttgatgccaaatttgataccaaatgtgtttatcaatatggtatttaaatcaattctgattttagcaatctatattgggttgtttttactaggcagattcgaattagcgactgacgtaaaacagatagccagaaatatgataaatagagggagaaaataacgagtgaaagtaaatattttaaatatggcgtttgataattatacaaaggctgagtttattgagaaatttgagaatagaattcatcaacaagagaagacattagttgtgacggctaatcctgaaattgtgatgtatgcaaaggataatccaaaatacaaaacattactgtcaaatgaagcggattacattacagctgatggtatcggtgttgttaaggcaggagaaatattaaagacgccaattaaagaacgcgtaacaggatatgatttatttttagatttactcaacatggcgaatcaaaagcaccttagtatatatttaattggggctaaacaggaaattattgaattagctgtcaaaagagttcaagaagaatatcctaatatcagtttagtagggtaccgcaatggttattttgatttggatgatcaaacggtacaacaagcgattattgataaagcaccagatatggtttttgcagcattaggattcccaagacaggaatatttcttagctgatttaaagcataagttaaataaaggctatttaatgggtattggtgggagttttgacgtattttcagggataacgaaacgtgcaccagtatggatgcaagatttacatttagaatggttttatagacttttaaaagaaccaacaagatttaagcgaatgttggtattaccaaaatttatccaagaagttaaaagagttggaaagaggtaagacttgtgaaagtactacatattaatgccggattggaaaacggtggtggattaagccatattattggactgttaagtcacttacctgaagatgatgttgaattattgacgtttgcagacggaccggttgctaaagctgcgaaggacaaaggcattaaagttaagattcttggtaaaaatagtcggtatgattttagcttattgaaggtactagcgaaatatattaatgatggaaattttgatttagtgcatacacatggtgctcgcgccaatctgttcattagtttgatcaagcgtaaaattaaagcaagatggataataaccgtgcatagtgatccaaggttagattttatgaataggggaatgctgggccgaatttttactaatctaaacgttaaaagtttgaagaagtccgatggtatttttgcggtcactaataactttaaagagattttattggcattaggccttccagatagtaaaattaaggtcatttataacggtattgcgttcagcaaaaaggcacctcaactacaagaacataaaaactttgaaatcgtaattgttggtcgcttgcatcccattaagggacatgcggtattacttgaagcttttcaggccgctaatatgaccagtgcgcacttaacaattattggtgacggcgaattaaaatcagaattgcaggccgatgttaagaaattaggtttggataatcaggttctgtttactggattactaacacaagatgagattaacctacgctatctaaaaacagatttggcagttcttagttcctttagtgagagttttccgttagtcttgctagaagctgcaaactttgcaatcccagttatcgctactgatgttggtgatatgcggcaattaattcccaatagttcttatggctggatagtaccgacccacaatgttaaggcaatgagtttagcgctagaagaagcatatggtaaatggcaatctggggatttgaaaaagacaggctttgcgttagaaacacatgcaaaaaaatatttttcaatagatagactttgtaaaacaacgatggatggttatcgatatttcttgagtaaataatgcaataatgggaggaagtactgtgtattcaaaattaaaaacaactattttttggtttattattatccaaccttttttagatattttttatttgtatcaaccaccaatatcgacaattctaaagttttcaccagcgactatgcttagaataatcttagtaggaattataagcattttatttttatggtctaataaaaataaaaaaatgaaactctttcttggaatttatatgggtttactgatagtgtatttcattgggcatcatttaaatgcaatgcaatttcattcattagttgatggcaactttggttattcaattacaggagaaattttttatctgattagaatggtgctaccattaattattctagttgtttcttataatgttaaattcaccgataatcaattggaatcaattatttcatggttagttgccttaatatcagggagtattgtggtaaccaacttattcaaaattagtttagcttcatatacaaatcaacgaattacgggtagcatcattaattggttctttgacaatagacatggtagttattttcagttagcatcgaaaggattctttaactttgctaattcaacagcagctgtagaggttctattgctaccagtaatgttgtattacttaattaaacatacaaacgtgaagaatttcatcttaagtttagtacaagtcttagcgatgtttatgttagggacaaaggtatcgacgttaggctgtattgggatagttattttaatgacagggatgtacttattcttcacacttattaagcaagatcttgttttaaaaaaatcggtgctaggtattttattactatttattgtgctatgtggcattatttatcccgtctcaccagcaattaatagaaccaactttgatgcacagattcaacaagaacgtgatggtgataaagcggaggtagagaaacgtgaaaagaaattagaggaaaaaagtaaaaaaggcgattcaaagaaagaaataaataagcatgaaacaccattaatccggtatattagaaaacattatagcgaatactcgattaatgccagatttattgaggtttcgtacccatactatgatgatcctggattttggaaagagattatgaagtggcctattcaagatcggattagtttccggaaaatcgaaattgcgatgcttaatcgtgtcaaagaagtgaacgacaatccaaaagatgagttatttggaattacgtatacacgaatgaataatatctttaatgttgaaagagattttatttctcaatactattcaatggggatactgggcgttatattattagtattgccttacattctaggtgttatctatttaatttatacaatattaagatattttagaacaaaatttacttttagaaatatgtcatttttattaggcattcttggtattctaagtgtgtcattgtatagtggtaatgtgatggattttctaacagcaacttttattttagcttttattgaaggccagttattagcaagagttaagactcaaacatttagtgaacaggaaaaaatcagtttattaatgccaacctacaatgatcaagaaacaattttagagtcactagaatcaattagaaaccaaacctacacaaactgggaattaataattattgatgatggttcaactgataataccaaacaagttgtcaatgattatattaattgctttaatttagagcataaggtgcggtatctctacgaatcaaatagcgatcaattgaacgcattgaaattaggggtaaaatacttatcgggaacaattgtctatattattcattccgacgatatttttagtaatagaaaagtattatcgcgtgcaattcatattttggagagtgatgatattgatgggattttggcagatattagtattgataatggtaaccatacaaaaataaggaaacagtccacactagattatctgggtaatagtaggcagttaaaaatacagaccttatggttgggccgtaacttatatttagattttgctttttggcgaacgccagtttttgaaaatcaagttcatcgtaattatttatcttggaatacgcctaactggatcaatctacaggatgaattaataaattcattaaatcttgagaatgctaattttagtgtcataaattatcgtgttcatgatgggaattatattaactccgaagtaggaaatttaaatgtattgaatggcgagttacgaacactggttagtctgttgagtcggtatcaaattcctaattatcaatttcagtatcgtattttcaggatatttaataagcttaacttactatcaatttattggccagttgcttttaaagggcaaacggcgaaaaaagcggttggtgagattgtaggattcgccgtcagtaaaagagtgcctgattttaataatcagccttacttaaaagcattgattgcattttataaagcggaccaagatcgtactgtagatttgaagataccggtagaattgccaatttattacggctctgatatgcgccagtttaaccaaaaaatgattaatggtactttagaaccgttttatggtgagctttttgaagaaatgcaaaagggatttactaagattaaggtttcaaaggaggatcttgctaaatggcaagtaatcatccaattcttgaatataaaaccatatgttgacttagaggtgagaaattaattatgattccaaaaaaaattcattatgtatgggtaggcggccacgaaaaaacagcggatattgagcgatgtatgaaaacgtggcgatcaaatcttaaggattatgaaattattgagtggaatgaagaaaattttgatatgaacatgaatgaatatatcaaagttgcatatgaacaaaaaaaatgggcttatgtgagtgattatattcgagcatatgttatctatcatgaaggcggtatttatttagataccgatgtgcttgttttagataatttagatcaattcttggataatcgcgcgtttgtaggatttgaaaatccacaatatccttttacagctgcatttggtgcagaacctaagcatccgtttgtgaaagacatgttagatttttttgaaggcgaatcatttacatttgatagagaaaatcaaatgaaaaacgtaaatactaaaacagtttccgatattttaattgacaaatatcattgtcaattaggtaataaggaacaaatattagatgagggtattcatgtttacccatccggtattttatgtaatccatcgggagattcatcaactatccatgtttttactggtacttggatggaagggcaaaagccactaaaacgaaagttaaataaatggttcaaaatacgaacaacttctaagaaaaaagctaagttgtatcaaaagttatttggatagtagtaaaaaggacggtaaaaaccgtctttttttgattgcttgttttattttatgatatagttatactaaatatatctctaattaggagtgcgacatgcaaaaattatatcctgatgatagtttgttgttacatacagacttgtatcagctcaatatgatgttaacttattttaaaaagggactccataatcggacagcggttttcgaatgctatttcagaaaattaccttttgaaaatgggtatgctatttttgctggcttagaacatatcgttaattatcttgagaatctccgctttaccgagagcgatttagcttatttacgggatgaagtcggttatcctgaagattttttgacgtatctagcagaattagattttgatttaacgattcgctcagcagttgaaggcgaattggtctttggcaacgaaccgattatgcaagtggaagggccgctcgcccaatgtcaattgattgaaacatcgctattaaacattgtcaactatcaaacattgattgcgactaaagcagcacggatcaaatcagtggtcggcaaggatcctgtcttagaattcgggacacgccgggcccaagaaatggatgctgctttatggggcacacgcgctgcttatatcggtggctttgatgcaaccagtaatgtgcgggcttccaaaattttcgggattccagcaagcgggacacatgcgcattctttagtccaagcctatcgtaacgattacgaagccttccgggcctatgctgaaacgcatcgggactgtgtcttccttgtggatacttatgatactttgaagagtggtgtgccaagtgcgattcgggttgcgcgtgaatttggtagccggattaatttccaaggcgtgcggattgatagtggtgatatggcctatatttccaaacgtgtgcgccaacaattggatgaagcaggcttcacggacgctaaaatttacgcttctaacgatttagatgaaaagacaatccaaaacttgaagatgcaagaagctaaaatcgatgtttggggcgttgggacgaagttaattactgcttatgaccaaccagccttgggcgcggtttataagttggtttcaattgaaaattcagatggcaagatggtcgataccattaaactatcaagtaatgctgaaaaagtctcaacaccaggccgtaagcaagtttggcgaattaccaaacaggttgatggcaaatcagaaggggactacatcacgttatgggatgaagatccactcgaacaagatacgatttacatgttccatcctaattacacatacatcaataagaccgtgaccgacttcaatgcccgaccaattttacggactatttttgaaaatggtaaacgggtctatacgttgcctgaattagcggcgattaagaagttctgtgctgaaaaccttgattcactctgggatgaatacaaacgggacttgaatccacaagattatccagtcgatttatcacaacggacttgggataataagatgaattcaattcgcaaagtcagagaagacgttaatttaatgcactagaatcgattatttttgaaggagtatctggcaaatgaacgctttacaagcagaaattattgcagccttaaaaacacaaccaacgatcgatcccgccaaagagatccgccgctcggttgattttatgaaggcttacctaaagaaaaatacatttttaaaaacctatgtcttaggcatttcaggcggccaagattcaactttagtgggcgcacttgctgaaaaagccatgcaagaaatgcgggccgaaactggcgatgaaagttatcaatttatcgcaatgcgattgccttacggcgaacaagctgatgaatcggatgcaatggcggcgattgaatttatggcagctgatcaagtcaaacgggtcaacattaaaggctcagtggatgcaatggtccaatcccttgcggaaaccggtgtaaccgttagcgattttaataagggtaatattaaagcccgcgtgcggatgattgcccaatatgggattgctggtgaaaatagtggcgctgttttaggaacggatcactcagccgaatccatcactggtttttatacgaagtttggggatggcggcgcagatttagtgccaatcttcagacttaataagcgtcaaggcaaggccatgttagccgaactcggtgcgcctaaacacctctataaaaaagtaccaacggcggatcttgaagaagaccgtccagcattaccagatgaattagcattgggcgtcacgtacgatcaaattgacgactatttagaaggtcgtcaggtcagtgaagaagccgcaacgaagattgaaaactggtacaagaaaacggcccacaagcgtcatttaccaataacaatctacgatacgttctggcaataaaaccgagtgcgtttcaggcggttatattgtggcggcttagcctaggctcgtgaaataagcgacgcagtcgattgtttgctagacgtagctaactgcaacaatatacctgaaagagcacgtttaaaaaacagagtgcgttgtcagtggttagctttcgagcctagtttcgtaaactaatttagttattaaaataactatttacttgccttttagattgtctataccttataatgaggttaacgataagggagtaactggcagcttgtctgcgataacgccaccaacaaggcaatattctggtgttatcttaattagtgagacttatgggggattctttgaattctctataggtctctttttttaccccgaaatctatctataggaggcacgacaatgacagatcaaccaagttcattctttacccaatcaacggatgagactttaaaaagtttagccacaacaactgatgggctaacgcaagaccaagttgctgaacgactcgctaaatacgggcgtaatcagttgactgagactaaacgaaaaagcttgttcgttcgttttttagaacagttcaaagatttcatgattatcgtcttattagtagcggcaatgattgccggctttttagcacatgaatggccagatgcgattattattctcgccgttgttatcttgaatgccgtttttggtgttttccaagaagccaaagcggaacaagcaattgatgctttaaaagagatggcaaccccggacgcacatgtacgccgtaacgggcagattgttaaaatcaagagtgaagaactggttgtcggtgatatcgtgctattagaagcgggcgatatcgtcccagctgatttacgcttgttagaatcagcggctttgaagattgaggaatcggctttgacgggtgaatcggtaccggttgataagactgttgcaacgttaaccgatcctgaaagtgggattggcgatcggaccaacatggcattcatgaatagtaatgtgacttacggtcgtggtgtcggggttgtgacgggcactgggatgcaaactgaagttggtaaaattgctgggatgttaaatcaagctggtgaaaccacaacaccattgcaaatgaatttaagtcaacttggtaagagtttaacgattatgattttaatcattgcggctgttgtatttgtggtcggctacttacgccacgcgcaatcaccaattaacatgttattaacctcaatctcattagcggttgccgcaattccagaaggattaccggcaattgtgacggttattttagcccttgggacacagaagatggttaaacgaaatgcgttggtacggaagttacctgctgtggaaacactggggagtaccgacattattgcgtccgataaaactgggacgttaacgatgaatcaaatgacggtagaaaagatttttaccaataatcagttgcaagaagcatcagccgacttggcaggcgatgatttagcgttaagcattatgaaccttgccaacgatacgaaaatcacagaggatggccagttaattggtgatccaacggaaacggctttaattgcttatgggcgtgataaaggtttcgtgatccaagatgccctagcagcagcaccacgcgtgggtgaagtaccgtttgattcagaacggaagctgatgacaacgattcatcaagccaaagatggtcaattattaatgaccactaagggtgcaccggatgaattactcaaacgcgtgagtcattttattgatgccaatggcgatgttcaaccgttagatgaagatgaacggcaatttttactcaaaacaaaccacgatttagcgaaacaagcgttacgtgtcttggcattagcgtataaaccgttagatagcttaccagcaacaattgatccgacgattgaagatgagttaatctttgctggtttagtcgggatgattgatccagaacgaccagaagccaaacaagctgtaactgatgcgcattcagcagggattcggacgttaatgattaccggtgatcaccgggatactgcagaagccatcgcccttcgtttagggattattacacctgaacaagatgcggatgcggccgttgtgacaggtgccgaactggatcaaatggatgacgagacatttgctaaaaaagtcagtcagtacgcagtttatgcgcgagttgcgccagaacataaggtgcggattgttaaagcttggcaaaaacatggtaaagtcgttgcgatgaccggggatggtgtcaatgatgcgccagccttgaagtccgcagatatcgggattgggatggggattaccgggacagaagtatcaaaaggcgccagtgatatggtgcttgccgatgataacttctcaacgattgtcgtggctgttaaagaaggtcgtaaagtctttgccaacattcaaaaatcaattcaatatttattgtcagctaacctaggtgaagtccttaccttattcatgatgacgattttaggctggcaaattctgcaaccggtgcacatcttatggattaacttagtgacggatacattcccagcgattgcgttgggggttgagcccactgaaccggggattatgaatcaaaaaccacgtgggcgcaagtcaaacttcttctccggcggtgtcttccaagcgattatctatcaaggtctcttagaaggtgggattacgcttggtgtgtatgccttagcgattacgtacccagtgcatcaagcgagcggcttagcacatgctgatgcgttaacgatggcctatgcaacgttagggatgattcaactcttccacgcgtttaacgtgaagtcagtgcaccaatcaatctttacagttggctttttcaagaataaagctttcaactgggctgtcttagcttcattcctcctgttagccgcaacgattatggtacctggcttaaacggcctattccacgtgtcacatctcgatattcaccaatggggaattgtcctagcagcctcattctcattgattgtgattgtggaaattgtgaagttcttccagcggagaatggctaaataatttgttgccgaccttgtaaagtgcttgtcaattaaactataataaaggtgattaaataacttttatgttagtgagttttgtagggaggattacgtatgcaaatattcttacagtttctgatatcacttttcatctttggtggtctggaacggattactcacgttcaaaataattggttgttgagtttcttactttatttggttattttcgcttgtatcgacttattgacaaagttaatgtttggtcagtcgtggacgagtagaatgttgaagagaagataggtaataatcgacgctagtgacaaacgagattttgtcgctagcgtttttttaatgaggtaaatgtcctttgatgaactaagcatgtcttttctattaatgacacatgctttaatattttaattgcaagccgattgggaaattagtatactaaaccataggaaactaggaggatggacatgaataaaacgcaacaaaagcttgccaaatacggccaagctgtcaacgatttaatcgataatactgaaaaagtacaagaagggatgagtaagtatttcacccctttaaaagcagccgttgctgatggtaagttagccgaaatgagcgaacaagactatcaaaagacagcacaaatcttcagagatggtgttgatcaatatcacgaattcttagcacaattcaaaacagttgttgcgcccgctcgtttgatggggaacaaccaacgtttaatcggtgcttacgctgatttcattcaaggctgtgaagatttaattacaagcatgcatgatgatcaaaccgttgatatgcaagcttttgcagcttcagaaatgaatcaagacaaagcaacggaacggatttctaaatacatccaaaatatttcaagaatcgcttagggcgaaagttgacagttcccaagtcgggggctgtttttttaattgaagcaaaaggagtgcaatcagatgcctgatattcaaaatcttgtgattcaacaattaacacagtatcgaccacaacaaatcaaagcaacgttaggtcttttagaagaaggcaataccgtaccgtttgttgcgcggtatcgaaaagaacgaacgggaagcctcgatgaagttcaaattcgtgaaattgaaagcacatttcaatacttaacgacgctcgaaaaacgtaaaaccgatattttgaaaaatatcgctgaacaagaaaaattaacgccaaaactcaaacaacaaattgaaacggcaacgcaactgcaagctttagaggatctgtacttaccctataaacaaaaacgacggaccaaagcaaccatcgctaaagaagccggcttggaaccttttgcgcagtttatcgcagggttacctagcttaaccgaacaagcattattggcaaaagctgaagcttacctcaatccagatcaaaaaatcaatgatacagctgctgttttagctggtgttcatgaaatcttggcggaaaatattagtgaaacagcaaaatatcggaattgggtgcgccaatatacttggcaaaatggtcagttggccagtcaagttaaagacgaagcagccgatgagaagcaagtttatcaaatctattatgatttcactgccgatttaacgaaggtagcggaacatcaatatttagcgattaatcgtggtgaaaacgaaggtattttgaaagctaaaattatgattgacgatcaagtaattgccagtcggatcagccaagatctgttgtatggacaagattcagcgtcagcaatggtcatcaagtctgcggttgaagatgcctataagcggtttattggaccggcaattgagcgtgaattacgcaagcaattaaaggagaaagctgatcaacaagcgattagtgtctttggtgataacttgaagcatctcttgttgcaaccaccattgaagggtaaagttgtattaggctttgatcccgcttatcggactgggtgtaaattagccgttgtcgatggcactggaaaattcttggataagttagtcatttacccacacaaaccagcttcagctgacaaacgatcaaaagcggcggatgaattcactgctttactcgagaaatatcaagttgaaatgattgcaatcggtaatgggactgcgagtcgtgaatcagaagaattcgtaacgacgtgtttgaaatctatttcccgggaaattttctatgtgattgtcaatgaagcgggggcttctgtttattctgcgagtgatgcagcacgggcagaatttccagatttacacgttgaagaacgaagtgcgattagtattgcccgtcgtttgcaagatccgttagctgaattgatcaagattgatccacaagcagtgggggttggacaatatcaacacgatgtggcgcaaaaagagctcactgtgcaactcgatacagtgattgaggatgtcgtgaatagtgtgggagtcaacctgaatacggctagccctcagctgctacaacatatctcagggttgtcagcaactactgctcaaaacattgtgcaatatcgcaatgaaaacggcctttatcaaaagcggagtgctttgaagaaagtaccacgcttagggcctaaagcttatgaacaatcggtcggattcttacggattattaatggagacaatccactcgataatactgatattcatccagaaagttatccaacggctaaagccattttgaaatcatttgggttaaccgttgatgctttaggaagcgatgcgttgaagacggcgattgcacaaatgcaagtaccggctctagcggctgaattagaggtcgggattgaaacaatcaccgacatcttaagtagtttgcaaaaaccagggcgtgatttacgggatcagatgacggcaccattgttacgtcatgatgtcttaaccttggcggatttgaaaccgaatatggcgttagaaggcacagtccgcaacgtgattgattttggggcctttgtcgatattggtgtgaaacacgatggcttagtgcacatttcccaactggcaaaccactttgttaaacatccttctgatgaagtggcagttggcgacatcgttcaggtttgggtgatgagtgttgatcaagaacgtgaacgcgtacaactgacaatgaaagcgccaaaggcaaatgactgatcaatctttaactgaattgattgaacggttatcgttgcagttttttaatcggccgtttgtgcatcaagcaaatttcaatcggcgtttaaaaacaaccggcgggcgctatcatttacaggatcatcatatcgatatcaatccaaagatgttgaccgaacatgatacacagaccttagaaggggtgattaaacatgagctttgccattatcacctgcatctgttgcatcgcggttaccgtcatcgagacgcagagtttaaacaattacttgcacaagtcgggggtgcgcgctatgcaccagctgcacaaaagacagctaaatcgagcaaagttgtgatttataaatgttcagactgtgggcaagtctatccacgtcgccgtcgaatgaatacggctcgctatgtttgtcggcggtgtcatggacgactgatttatcaaaccacacaaattcaatgaaaaaaggccacccctcattgatttgatactcttctaaaactaatcccatggcttgccaaataaccatatggttgaactactcattgatttgatactcttctaaaacagtctcatcaagctgacgttgccaataatcgttgaactactcattgatttgatactcttctaaaactctgcacttaatacaaccccctctactcaagttgaactactcattgatttgatactcttctaaaactcccggtaattgctaaattaaaaaataagagttgaactactcattgatttgatactcttctaaaacccggtgtcatcatattttctgggtattcaagttgaactactcattgatttgatactcttctaaaactgaagggtttgtttcacagatagtgcctaggttgaactactcattgatttgatactcttctaaaacggaactcaagcattctttacagtcattttagttgaactactcattgatttgatactcttctaaaacatacaccttcatcagccattcgacgacgttgttgaactactcattgatttgatactcttctaaaacttaaacgtaacaaagaaccattacacgttagttgaactactcattgatttgatactcttctaaaaccgtcaactatgacttggccttgcaagtcgagttgaactactcattgatttgatactcttctaaaacatgtgctctccatttgacgcatctcagcttgttgaactactcattgatttgatactcttctaaaacaacatcgagtgctgtaattagtttatttaagttgaactactcattgatttgatactcttctaaaactcttagttggttgaattagcgcttgttgtggttgaactactcattgatttgatactcttctaaaactttcgcctacttatccaaaggagaacatgcgttgaactactcattgatttgatactcttctaaaactaaagataaaaatgaatatgtattttcattgttgaactactcattgatttgatactcttctaaaacgatataatttagtcagtcaaaacatcaacggttgaactactcattgatttgatactcttctaaaaccattgctaacgttccagttacctggcgatcgttgaactactcattgatttgatactcttctaaaactaggtacaaatgtggaagcgactagcctaggttgaactactcattgatttgatactcttctaaaactaggtacaaatgtggaagcgactagcctaggttgaactactcattgatttgatactcttctaaaactagtcttattctgcttttggtgcgtctggtgttgaactactcattgatttgatactcttctaaaacgacaatgcctaacatttatcaggaatcatagttgaactactcattgatttgatactcttctaaaactgtaaatcgcgtaactgataactttattaagttgaactactcattgatttgatactcttctaaaactagcaaaacgccaataaggtaagtcataatgttgaactactcattgatttgatactcttctaaaacaagcttaataatacgacgaccaacgaagccgttgaactactcattgatttgatactcttctaaaacttgctattaaaatcaaaaatctgtgtcttggttgaactactcattgatttgatactcttctaaaacattgataattgcattggtaatgtaccatctgttgaactactcattgatttgatactcttctaaaacacaacgctagcaagaaatacaccgaactgagttgaactactcattgatttgatactcttctaaaactgtcataacgcggcggatttcccgcacatggttgaactactcattgatttgatactcttctaaaaccgtcgttttttcatcagaatttcattttattcatagcgccattcgacataatcattatcgatgtgataataataacatttctggtactgatcagatttaacctcttctgaaaattcaatgagaaagagtttcacattcaatgtcgccaccaacctcaccaattcattaaattggttgatactgagatagtgcgaaacgttgatcaacgtgattatttttgattcatttaactctactgctgtctgtactatactctcgattataccatatgggtcatgttggacgacagtcgaaaattgtaaattatagaacttaatcattctttgaagatcccattcctgattgacatctaaggtcaattcatacataaaggccgcatccaaaatcgttgaacgaatctcactatctaactgagttaatttctggcgctgctgatccgttaagtcggcggcgaattttttaatcaaccgattttgaaatagatgattcaaattaattgctgccacatccccaccccaaataacagcctttgaataatccattaattcgtattgatcattgctaaatttaacggtctcttgtgcgccggacattccaataatgagtttggtatacacttctggactacttgtactgcaaaccgttattttcttattctgaacgctaaaggggtggtatggataaaaagtaatgttcataaaattaacgtcctctcagcagaattacggacgtcatcactcgattcgcccactaagaaatgcattttattatattgttgctcagtaaccatcaacgtttgtactaagcctgcaggcggagtaaagccagcaattcggttctcgataaactgcgccgattgtttgctgacacaaactcgaacataaacagaatattgaatcattaaaaaaccttcgttaagcagcgcttttctaaaatgacggtatgccttgcgatcctcgctcgtttcaactggtaaatcaaacatgactaataagcgcattattcggtacctcgtgagtcattaccacctttacttcaaactcttctttcggagttgtcatgaatttcaaacaattctgtacgtgtttagtgagtgcgtttctaagaattgtgatctgtccattatattctagctcaagattcagtaactccaccaaaccaaatttaacatcaggggttaattcattaaacttttgatgtgccacccaataatcaatcactggtcgaaaaggttccattagatcggaacccaaattaaaatcactgacgccattgtgatgatgaatgccaaactgtgttaaatagccattacaaacaatttcgcgattaacggctgataacaacaaactataaccataattaagggctgcattaatgggactgtactccgttcgaacaaagtctttatcaaaaactaactgaaaatacttgcgcgcaatcacggcttctcgatttgttcgatcagcaaataccattgcatcagcttctgttgttaagtcttcaatatcctttcctaacaattgtgcacattgaatttgcatcgctattttggcttgaataatcgccgtccataaggtttctttcaaccccgttccccattcaacctgttgctggatcgacgcgagactacgatttcctggataatccgcaattgtttcgcaagttggattaccgtctttgcctgtaaaaataatcttagcgccagcttcactcaactcagtaatcgccgatgccgttaaaacggcctgggtagtcgcaactaacaaaatttggatatcatcaattggtacttggtgtgttgcatcttttgtctggacaataatcttccgtccagaataagaaacctttgcatgttgtgaaatcacaactgttcgccaactcataaaaatttaccccctacatccttgttttcaaaatgataacatgctataatgctgttgttgagcttgatacactcaatcgaaatactcattgatttgatactctgagttaaaatcaaacaaggtcttcggaccaagttttctattctgagcctcttatgaggcctttttttatgccttcaaaccaaaaagctagcccatcattacactaatgacaggctagctttatttatttataaatcccttaaagctactcgtcgttcgaataaaccggttggagattgatagataatttgggtatcaggtgaaagagaaatccctgatggttgctgcatttgacctagtggcgtacttattttcaacacccctaagtcgataactgccgcatttgcatgcaatccaattagaactctatccaatataacttgttgcccaacctgcaccatcttattaccatcccattgactcttccacggcaacttcataaaggctgctttacccgcagataatttagctctgaattgattagtatcatatagtgggaaatagtgcatcacttgatctaagatttcatcataaacttgttcagcaagttcttcagactgtgttaaaggtagcgcgccatttaataatttaacagccgttttatcgagaatcagttcctgctcgttgtgtttatacgtcgcagagcccaatgtcaattcttgaccattatcgaagaaacgttgattgattaggatatgtggtgcaatgacttcaaagtcttcgaccactttcacaatcgttcctttttgttttttcacttttgtaaattgcggactaattttttgctttaagaatgccttttgtgagtcttcatccgtcagttgtttaagttgcgctagccaacttgtctcaacaccacagactttatagagatcaccctttttatttttaatgcgtacaatacacatgtaggcaacggtcttccctgagtacccaccatagagtgcagttggtcgatcttgtttagcgggaatcaattgcttaccgccctgcccacttgctttatcatctttagccgcatagagcgtttgattaaatagcgctcccgaattttcatgcacttcgcgagtcactagaatcttcttaaactgatatattttattcaaataagctagaccggattctttatcccaaataaccacttcagtattttcatcaaccaattcgtctttctttagaccatttaaaaaattaaagttacgccacttatcttgctgacttgccttctgatactcaccgtatacaaaataaggttttaatttaggatagcgcttcaatagatacagaccaacgaatgcggtcagataagcatcgaatgcatgatgatggttatttagattacgattcttcggaaaatcgaattctgttcgcatttgatgggttaacccactcttaaccgtaattaactcaatattgtcttcaccatattgttccatcaatagatttgtcgctaacttaatgacttggcgtgtttctactaattgccgattaataaagcccttcatggcgtatttactgatatgatccggatttaacgttaagttatcatattttttcttggtaattaacccagctcgcaacatctgttcccattgaatctgcatcttttgtccaagttcaacgcttgtaaagtcggtcggtacttgatctgctttgctacggttcattttttgagaaactaaaactcggttatctaacgaattatccttcacaaacgactgtggcaagatatgatcaatatcgtacgtcgataaacgatcaatattcaacgaatcacccgtatacatatcccgaccaccctgcatgaagtacaagaataagcgcgtattgctcaatgcagaattcgataaatccttaagttcatttctgatttcagtattatttagcaattcattgctgatattttgatagacttgttcaacttggcgcttacgttgcaccgaaagtcgtggattcacttcatcttcgcgcgcaaattcaatcaatatccgttctggcgcctggcctttcatggccttttgaatgtcattgacaacaagcagaatctggcggagcgcttttttattctgtggtgacgtatataaatcattgataacatcttgtacatcattttcagctagcatcatttgattagcttcagtaattaatttatcaaagtcttcagagtgcacaatccgcatgaagttatccgttgtatcccagagtaagtccataattcgttgtccattcgcattgacgatttgcgttaataatttagccgacaaacgaccccaaccgcggtagcgtttagcagctaattgcacacgttgctgatccgttaaccaatcgatttcattcaatttggcgctatatattttgccgtcttcaaaaatcgttgaccattcaatacatttttccaaatcggcttgtttatcaacatcatcaaccgcatctccaacaatcatctttaagtcatgatacgtgcttaatcgactattaaatttgttctcatcggatagaccagtaattgcgggacgacttgcatagcgcttttctgataccaagtaatcctgaatatttttcactgttacacttattttttgcataaataaatccgtaaatattgcttgtttcaactccgtcgtaatcggttggtcatcaatcttaagtccgtttaattcattcaacacttcaaaccgttgataaattaagctctgtttagggagtacatcttcagccaataaataagtatcagtcgttgtcatgcgcttaatgaattcattagcggatgcttgacggtccactttatcatcgaagttccacggtgtaatccggccttctgctttacgaatcagccacgcaaatttcgcatcggagctttgtcgttgctgctcagccgtaatcaggggccccacatagtatggtactctaaaggccactaattcgtccaatttatatttagcgactgtttgccgtttagaattgggattaagttccgctaaccagggatagtattgttgttggttctcaataatccggtctaattcctgttgatgtagttgatgcgggattgccccattatctttggtccgttgttttggcataaattgatcaagttcaattaattttttaatttcactcacaatcggatgatctgggttgttctttaaggcttttgtgatatctccgtaaaaatcttccttcgaataggccttcgtattttcttgaccatcaacatattggtcataagcctgctttaatctctgtcggtctccaggtgctaacgcttcccgtaccgcttttagcatttttaaatgcttttgatgatcgtcatacttcgtgatcatcgcttgcgacaatgattgattttcgggaacgattcccgccaatagaacaccagaataaagttcctgtaggctttcgataatttgatgggcattatcatcaagactactctctaacttgaccatttcttcatcaaagttttctgcattaaaagtgagtgtccatgctttaacatcttcggcttcgatcccagtaagcacattaaacttcgcttttaaccccaagattgcttttaataattctgtcgcaatcgccttattctgcttttcaactgccttattcgtacttggcgtataaatcagtgataatgcttgtctttgccgattgctagcactttgttgattatccaataagagcgctttgacctccgccaatttatccgtctctagttgaaagccagattcactgaacaagtcagcaaaaatcgtgtttagtctgtcaaaatgagccactaaattaatttcgctactcttaaaggatgagacgggcgcttcatttaaaaagtgcccgcgatacttcacaatatgatgcatcgctaaataaatctcgcgaatatcaaattgacgtttctcggtcattagcttatatcttaaatggtaaatcgttggataatcgtcatagaatgcccgatctgttcgatcattaaataaacttgtctgtggatataactttcgctgatccttcggacttaggtttgattgtttttgccgcaagaaaaaagtatcatcaaccggcgtgatatagggttcaaagatttctcttaacaatcctaaccgccatttacgtcgttttaatcggcgacgtgttgttctaaagctgcgccgttctgcggctgtttgtccttcattgtataaacgaaccccataaccatatttacctcttacactgaccaacttactttggtcatcaaccactgaccacccaattgaactagtcccaatatctaaaccaatattatacggacgactcattcttactccccctaaaagtttatattcaatgatagtatatccaatttaacccgctttttccaattaaattaagaattacacatgctaacagcaaaaaaagacaagtcttaatgacttgtctttgatcattattcaactggtaacactgcgccgtgccatttattcttaatccattcttgcgttgattttgatttgagcgctttaacgagcttcttgatagctgggttattgcggtcttttttatttgtcacaacaatgttggcaaatggcgaagattgcttttcaagggccacagcatccttttcagggttgagaccggcttgcacagcatagttcgagttaatcgccactaaggtgccttcatcattcttcaaaagttcaggcatgagttttggttcgaatgtgtactcaaacttgaggtgtttgggattgctagcgatgtctttaaacgttgcgttttcagcatttacgcccgatttcaaggtgattaagccaccgtcttttaaaattgttaaaacacggccccagtctggctggctgcttgaaactaatactttcgcacctgatttcacatcactcaattttttaacttgtttactgtataagccgagcggttctaagtgaatactgccaacactgactaagtcgtagccgttatctttattggccttcttcaaaaagggtttgtgttggtagtagttcgcatctaattcgccactcgctaaagctttattgggtaaaacataatcgctaaagacttttactttgaggttgatgccttcttttttcaactccggttgaacgtgtttcaaaatcgcggcgtgtggaattgcggatgccccaacgacgattgtgttgctgtctgacttcgcttctttgttaccacaagcggcaagtgcgcccgctaataagaagactgctgctaataatcctaaactgcgttttttcatgaaaactcctccttttaaattaacgatgatcaatgtgttgaacaaccaagtcgcccgttttttgacaaatgaagacgatgattaaaataatcacggttgcgactaacgtaatcgcattttggttagcttggaacccatcttggtaagcaagatttcccagcccaccggcaccaatcacccccgccattgcggtataaccaacaagtgaaattgcggtgacagttaagccggaaacaagcgccggcatgctttctggtaaaaggacttgccagacgatttggacttttgaagcgcccattgaacgggtggcttcaagcacaccgccatcgacttcccgaaaagctaattcaacgagtcgtgcataaaagggcgcggctgagatgattaacgctggaatcgcagctttcgggccaatcatcgtgcccatcaagccttttgtcaatggaatcaacaagacgattaaaatgatgaatggaatggaacgaaagacgttcactaataaagccacaatgccattcaacagccgattcactcgaccaccactcgcgtttgtttgataaagaactaacccgagtgcgaatccaagaactgccaccaataaaacactgacaattgttaaccaaactgtttcaaaagttgcttgccacatacttggccagttcacttgcttaaattgaaaataggattgaaatccgtttacgttatccatgacgtaccacctcaacttcgattgtttgttgtgctaattctgcaaggactgcctttaaatcacttggattagcttgaatttgaatgtataaatagccaagtgcgccattaatggtttgttgtaaactcccactgatgacactgatttcgactgctgggtattgacgcatcaagcgaccgatcaccggttgactcgattgttcttcgttaaatcgcagttggacgattgtaccatttggaacccgttctaacagttgatcaatcgaagcggccgtttcactcggtgataccactaaggattcagcaacaaatgccttggttgcagccatttgtggtttttcaaagatttcgtgcacagtcccttcttcgattaaccgcccattttccatgaccgcaattcgttggcaaatccgccgcaccgcatccatttcatgggtgacaagaacgattgtaatccccatttcacgattaatcttagccagtaacgttaagattgaattcgttgttttcggatcaagggcgctagtcgcttcatcacataacagaatcttcgggtcactaatcaaggctcgtgcaattgcgacccgttgtttctgaccgcccgatagttcgcttggataggccgcttctaaatgggtcaattcaacaatctttaataatgcgcgggctttgatttgtcgttctgccttaggtaccccggctaattttagtggcaacatgatattttctaacaccgtctttgaccagagtaagttaaagtgttggaaaatcatgccaattttctgccgaatcggccgcattgcttgttcgctcaaccccacaattgactggccctcaacgatcacatccccagtcgttggcttttcaagtccattcaagagtcggatcaacgtactcttaccagcgccggaataaccgataatcccgtagatttcgcccgcttcaatgttcaacgagacatccgttagtgcggcgaatgttttttgttctcgctcaaaggttttacccacttgttttaatgtcaacatactaatcgctccctcttcttttaaaaaatgccaaaaaaaaaatccttcctctcaaataaatgagagaaaggacgctaaatgcgtgttaccaccttaatttacgattacctcacagtaatcgccttacaaagtacccgattgatactcgttcgctatatcgggcaacccccgcattcggctcagttaaaccttaccaaatgaattgctcaaagaccatattcatctagctttcacattatccgcttgcacctgaccggactctcttaaaatgctactgactaaattactcatcttttcatcgcttgtattaagtagtacctatcataattaaagttcaattaaaagtcaagcaagactattcaaaaaaatcagattattgtttaagtaatggcctaatcgacccgaatgtcagcaatccacgcatctttttcgttatctgcatttaataattccggattatcagctaacggtgtgttgacgtttactaattcaccagctagtggactgtcaagatcttgtaccatcttctcagcttcaatggccactaaggtttcattagccgtcaatttttgccccacgattggaacattaacaaacttgattaacccaaactcattttgtgcggctttggtgatcccaattcttctaattgatgctgcaatttcctctgtccaaaaataatcattattattcatcgtcatccgtcattcactcctagaaagtatcttcagcttcactgaacatgtaactcttataatggtaccgcatcgacatgataaacccaacgccaattaggttccccaataatgacgagcccccttgtgagatgaacggcaatggaatccctgtcaatggtaataaaccaacgctcatcccaatgttttcgaaaacatggaacaagatcatcatgatgaccccagttgagacatacgcgtaaaattcattcttcgtatcaaatgtgacccgaatcatttggtaaatcaacaagaagtacaaaagaatcacaaaacatgaaccgacaaagccgaagttctcaccaatgacagagaaaatcatatcggattcacgtactggcacatggacttgcacttgattgaagcctttcccaaatagctgaccagacccaatcgcttttaaactctgcgataattgtaaactggtactggcagtattatcaaaaggatgcagccaagcatcaattcgattgaattggtacgttttaaagcccagatgcgtcaagattacccggccaggggtcgtcgccgctagtgtaagggccgtgcccccaacagcgactaagacagcaatggctggggctaaaatcttccaggtcacacctgagacaagcacaatcccacctaagatggcaacgaacactaataaggtcccaaagtcattttgtaatttcaataggaccatcactggaagtgtccatagtaacattcgtccaagtaacatccaatccgtcttaaccgtgtgttctggataagccgtattgtgttgagtaacgaccctgcccaacatcaaaatatatgccggtttcatgacttcagatggttgaaatgagattggtccaagagagaaccaactctttgccccagtttgcaaggcgactgcccgattataaaagattaaaacggcaatcaagaggaaaatccctaacccataagccagtggtgcaatccgccatagttgttctgaatcaaactgcataattgcgacaatcgcaattccaccaatcacgtaccatgcagcttgcataataacggctcgagttgaactcgcacctgatgtatcatgtgacgttgccacatagattgacatcaagccaatcaacgctagcataaagactgaaaagacgattccataatcaactcgcgaggaatcttctgttgtttctacttcctttggcatgctaagtctccttcaatcaattctgctctcattatataaataacccggccagaattctgccgggttactgtaattctaattaattcttaagaattaaccttggtgtaagtggtactcccgtagtaattcgttaactgcatcgtcgtgggtcttagtaatgatactttgaccagtcccttcaacagttgcttcaaaacgtttcttagcgctatcttctacaatcacgccaatttcatttttgccgaccatgacgcttgtcatttcttgaccattacgtttgatgtcatcaattgtgacagtaattttttgttctttttttgacatagttatgttgaacccctaacttctttgacttacttttgtgactcgtcttgctgtcgattgcgcaaaacggtgaaatgatctggtactggatcatagccgccccgtacaaacgggtgacaacgcaatatacgaccgatgcccatgattaaacccaaaatagcaccatgtttttggattgcttgaatcatgtaactcgaacatgttgggtaatatcggcaactcggtggtaataatggtgaaattcccttctgatagaaacggaccaatccaatcaatattttccgcaatttatctgcctcactttagcgcatgctactgcaagaaattaataatatgactccatgtactaggcaagaaaacggcaaatggattctggccgccaattgcaaaaccaatcatctgaccaactaataacgcaataattatgagcacgaaaaccaataaaattttctttaaaacgggtttgacgtgttcgtcaaaatttgattgatacacacaatcacaatccttctttaatagaatgcggcttaataagcgcgtttatgttcaatattatctaataagatgccagtccctaaagcaacagcatccaatggattttctgctaagaccaccggaaccttcaaatgttctgagaataagctagcgatattgcgtaataaagcaccgccacccgttaacatgattccccgatcaataatatctgcagataattctggtggtgtcacttctaacacttctttggcagccgcaataatttccatcattgtttcatgcaaggctgattcaacttcatctgcactaattgagacagattgtggcaacccacttaccatgtcccggccacgaatctcaagtgactcactcgcatcggcatgccaaacgttaccaattgttaacttaattgtttcagccgtatgttcgccgattaatagattatgtttcttcttaacgtatgcggcaatttcactattcatcttatcgcctgcaagacgcaatgaacgacttgtgaccacttcacccattgaaagcacagcgacgtcactggtcccaccaccgatatcaataaccatgttaccgcgtggttgaaaaatatccatgccagcacctacagccgcgacttttggttctaattccaagaagactttgccgccacctgatttttcagcagcttcaacaattgctttttgttcaattgatgtaatatttgttgggcagcaaatcaaaatattaggttttgataggaagccctttacatttaatttattaataaaatacgctaacatttcttctgtaatgtcgaaatcagcgatgaccccatcctttaatggacggacagcgtggatattgccaggtgtccggccaaccatccgatacgcttctgagccaactgctaaaacttttttggtttgggtatcaatcgcaacaactgaaggttcgtttaagacaatgccttttcccttaacgttaattaagacgttggcagttcccaagtcaatcccgatatctttagccatttggtgttgctccttccgagaactatattcagtaaatcattataccataagacaggtacctttagtatcctgatttggcaaaataaaaaagcgacgtccgctgaaatagcaggcgccgccagtctgttttatgcacgttttgcttgtttaatccggtgaccggcagcatcaaaatcagctcgactaatatgtgccccaagtgcccgtaatttttgatggaaatgatagtaaccccggtccatgtattgaaggttcgtaaccaacgtttcaccattagctactaacccagcaatgacaagtgctgcggcagctcttaaatcggttgcagccacttcagccccattgaaatgtgtatcgccataaagcacaactgattgaccttcaatttgataatccgcattcattcggcggagttcttccaaatgcatgaaacgattttcaaataccgtttcggtcataacactcgtcttcttagcaagtaattgaagtgtcgtcatttgtgcttgcatatcagttggaaagcctggataaggtagcgtcttgatattacatgcctttaattcagcgggaccaataattcgaacaccagcttcttcgtcaatcacttccgcacccatttccactaattttgataggagtggtttattgtgttcagcaatcgcttctttaatcaagacatttccttgtgttgccgcagcggctaccatgaaggttccggcttcaatccgatcttgcacgatactgtgatccgtcccgtgtaaagcggttacgccttccacccgaattgtctcagttccggcgccaaaaacgttcgcacccattttgtttaagacattagcaagatccacaatttcaggttcacgagcaacgttttcaatcaccgttgtcccttcagccattgtcgcagccatcatgatgttttgtgtcgcaccaacactaggaaaatctaagtaaatattagttcccactaggcgttctgctttagcttcaatgtaaccatgattttgatgaatggttgcaccaagtgcttcaaaacccttcaaatgtaaatcaacaggccgcgaaccgatagcacaaccacctggcatcgcaactcgtgcgtgacctaagcgcgctaataacggccccatcacaacgatggaagcacgcatttttgaaacatattcaaaagctgcttcaaaattcaaatcaccactggcatcgattgttaattggttccgttgttcatcaaactcaactttagcatctaaactctttaatacatcttgcatcatgaagacatcagataaaataggaacgttcgttaattgaacgggtccgtcggttgctagtaaggcagccgccataattggtaatactgcgtttttggcgccttcgatttgaacttcgccaactaatcgttgaccgccttgtataatcaatttttccaagagtttccctccgaataagactgctagtttatgggactaaaaaaatcacatttttagcctgcgcgattatttctaaaaagaattggctaacggtgtagcccatcacaatagcgagaaatactatgacaatctgtacttgacggatatgattcggtttgaaaaattgctcaaaccggattgattgtaagccataaaaactgattaaaataaaaccaatatggctaataattgaaataactgcctgtaacccgattgattgcacttaaataacgccccttttgtgatatgcaaacattgtaacataccgaaataggatttgtctgcccaccagactgaatcttaagaaacaaaaaaaattaatatatcatttctaacgaacactgtcaagcaatttttataaatattttctgaatatttattcaatctcgtttgacccgttatttcgttagcgatgagcttttctctcgctgacaacatagaatactataccaacatctaaatctatcgtcaagtaaaatttgcataaaattcatcttttttttaaatattcaaacaacttagttatttgcaagctttgcttggcattctggacagataccatgcacttccattcggtgcccagttaccataaaccccgttagattctcagcaatcacttctacatcatctaactccggataaaaaacatcaactacttttccacagttctcacaaatagcgtgataatgcttggtctgcgcaaaatcaaaatgactggatgcatctccataagccatttcttcaataatccctaatgaggtaaacagacgcaagttattatagattgtcgcaacactcatattcggaaagcgccctgctagcgccttatagacatcgtctgcagtcggatgcatatgagtgccaatcatgaattccaaaacagcttgccgctgtggcgtgatccgtacgttgtgttctttgagtttccgtaacgtttgttgcacgatgtgactcattttgccaccacctttcgctaatgataatcattatcatatatccttattgctgtaatcgtacctttttttgacgagactgacaagtatctttgctcaaaaaaagacgttacgcgagtcccgtaacgtctttacatactttacttcaattcaggtgcatccgtttcataaaggtccattgttgacttaccattattttgctggataacactcgttttattgttactgtctttcaacttagctttagcatctttcaccttgtagctaatcttagacttatctggtttttcgaatccttgtggtgtatagaatcgaagtagatcgccggtgattaccttgtcagaaagtgacaattcttccgttacatgttcactgattgccgttaattgcttcttctgcgctgccgttaaattcgtcagcgtcttcccattagtcgtatcgtaataggtgctgcctaccttcgtataccgtggtgtgacaaagtccccatttctaaagacaaccgtctgattgcggttaggcgcaagtaaatccgaaccaaattggatggtatcgtcattttttacacctaataggttcaataaggttggtaaaacgtcaatttcaccaccataggtatggttaacgccaccttttaacccatccatatgcaccatgaacggtactttttggaattgcgcattatcaaaatcagtaaatttatcctgattcaataacttcgcaacagccttcttatggttccctgaaatcccataatgatcgccatatagaacgagcatactattcttatctaagccagtcttttgtaaccaagctaagaattcaccaattgattgatccaaatacttagcggtttgcacataaccatcaactgtatcatcaccagtatcggtcttagcaattgattgattttgtttatccaataagtatggatagtgatttgtcacggtgattaatttagcatagaacggttgtggtaattgttcaatgtattgggctgagtcttgcatgaagatcttatctttcaagccataacccacgttgtagcctttaccttctttaaagtattgagaactgaagaagtaatcatagccccatgacttgtaggtattatcccgattccagaaacttggcacatccccatggaatgaagcggttgtgtaaccttgttgatctagaattgatggtgctgcttggaaggtattggttgtcccttgagtgaccatggcggccccttcaggtaacccgaacaatgagttttcgagcattaattcagcatcagccgtcttaccttgaccaacttggttaaagaaattgtcgaaactgagggtgttttggtcgtgatatagcttattgatatttggtgtgacttcttgaccgtcccacttataatcaattaaaaattgttggaaactctctaaatggataacaaagacgttcttacccttagccacgccagtgtattcaacattgggtgcaacccggttgtccttcatatacttcaagacactgctcatactactactatcagcattagccttaatcgcattattcttggtcgtcttcacgccatcatagacagtgtatgcattcatcccaagatacttaatgatgtagttgttatcgaacgtccgggttaataacccagaacgatctgcttctgcaatcccgaggttggcaccgaataacacaacagctaacccagtaattgcaaatgcattccgcttcataaagacacggtgatcaatcttcactaacttagtagccaataagatgattagcaataaaacatcagcgaaaactaggaaatcagaatattcaataatcccagcaatactcttgcccaagttatttgataccgcaccagaacccttcattaagttaaacgttaagaagtctgaaaattcacggtaatacaaaatattcgagaataaccaagttgaggttattaaatcaataataatcaacgtaatgtatgactttcggccattcataaacaaggcaatcccaaatagcaataaggttgttggaatgggattaatcgtcattaagaaggcctgcatgccacctttgacgcctaagttaaattttgtttgatatgcgtaaattgttttaagccagaatagcgcaactgcgaaaaggaagaatccccatcgtgtgcttaatcctgattgaattttatgaccaatttgtttcatcgatacagtagcctccgttaaaggtcgttgggctttaaaagccgttgacaatctgaaagttagtttacacatccgtgaaatgaaaagcaatatgtaaccggcttgaatgccaaatattaaaccatttttaataatctgagtcgcaactgagcaaggctatcacctgcttaagtagcaaaaaaaccatcaagtaattcgatactcaatggttaattaactagtctgctaataaatcgtatagttccattgcaactaaatcaatattgtcaaattggaattgttgatgtgtgttgctgtcttcaagttcaaatgcttgagcttgaggatcatagctaacagttgcttttaaatcgccgtccttttcaaaacgtctttcttgaacctcagcgctttgatcttcttgcattgctaccagacgtttgataatcgcaactaactgtgatgattgcatggcgaagcctcctttaataactaactatcagtttatcagaaaaagagcacttctgcaccgtttatatccaattattttgcagaaggccaccataatttaattaaagcttgggtgccatcgtcgcctaattgtttatcattaacgagctgcgcatagagtttcttagcttgaagcgtagctggtaaatggagccccatcttttcggattccgttaatgcaatctttaaatccttcaaaaaatgttttgcgaaaaagcctggtgtatagtcttgcgctagaatacgtggaccatagtttgcaaggctccagttctgagcactcccaccattaaccgtgtttagaaccgcttctagttctaatccggctgctttagcatacactaacatctctgtcattccggtcattgtgccagcaatcatgatttgattggccatctttgtatgttggcctgtcccggcagcaccgaagcgatggacagtcttacccattgcttcaaaaacgggtaatgccgtttcataggcagcttgatcgccaccgaccataatcgtcaacgtcccgttttgggcgccgatatcgccaccagaaacaggcgcatctaatgcttgcagacctttgtcagctgctgttttggcaattctctgcgccaatgttggcgtgctggtcgtcatatccaccaaaatctgaccaggttgtgcagcactaaaaattccgtcttcaccataatagatggcttcgacatcttgcggataaccgacgattgataacacaatctgactttgcgcgacaaccgctgctggtgaatcagcccatgttgcaccgagtgccacaactgcatccgctttttgttttgtccggttatacacgacaactggatagtctgccttcaataaattcttgaccatgctactacccatgacacctgttccaatgaagccaattgttggttgcatcaaaaacgcctcctactttttatcagttactcgtggtttaactgctaacgccccaatccccatgaacatcccgagatagtacgtaaacaatcgccagagcaacatgcctaacaccagtttacttgaactcgggataaaagtggcaaataacgtcttaaaactatattctgccccaccagaaccgcctggaactggaaagagcgagacaatcatgacaatcatgatgtgtaagaccatcacctctaaataattaacatgcgggatgccaagtgccaataagacaaagtatggcacactataatagaaaaaaagttgcccaagggttaaaatacagcccttgattagtttctttttctcgcgtttaaggtgtagactctccgcgtaaaaggtatcgattttggccattaacattgtccgccattccgtcacccgtttttgggagacgaaccagcccaccggaattaataaccagtgcactaactgtttcgtaaatcgattgtaatacatgattagcaacaatacggctaacacaaccacatgcacgattaatccgaaagtaatcaaaatcgacagcgtcccaaaatgcttggaaacttgcgagaaaccaatcatcatacttaataagaaattcaccagtaccatgaattggtaaacaataaacttcatcagcagtactgagctagcttgcccagcttctacacgggattgcatcaacgctaccagttgtgccggttgtccacctgaagaaaacggtgtaatcgcattgaatagttgtgcaatcaacggaatccgaagcgcattgtataaagaaaagtgttctgtgcggtcttttagaaagacgcgtaagacaagtgcctcgaaaaaccacgaaattaacatacataataaggcgaccaacagccaccaaagtttcagatgactaatatcgataaacagctgtttcaacgccagcgtgcgactttcataggcaaaaatcccacacccaatcaacagcatgactgcaaaaacaatcttattcgttctactcataaacgaccctttttcttgttattagcaacgatatgaaaaaactattgattatatgatcaacagttttccgccagcgcgacttattttttagtatctaaatcttctaattccaataaatcatcttggtctaactttaattcgtcatataatagctgtgattgcttatagaaatgaatcatctgttccgcaaagtaatccgccgaaatagcatgcaacttctttcggcgcggtgctggatcatcaaatgcatgtggatgattcaaataattcgatacttgatggatcatttcatcttcgttcgtaaatgtcgtcccaattgaaggatcagttaataactcagccgcatatggacttgtcatgacgacaatcttgagttcagcggccatcgcttcaatataagttaatccttgtgattcagagtcactggcggagacaaaaagattcgccatatgataataatttgcaacttcatcgttatcaaccattccagtgaaaatcacgtggtcggtcatgtttaacttggcaacctgagcttctaaatcttctcgagctggaccttcaccaacaatcactaacattaaatctggtgtttgggcgactagtttgggtaacgcatcaactaagatatcaatccgtttttcataagcaacgcgactcaatgataagagcacaggttgttctggcgtcaagcccaattcggcccgtatgtcgcgggtcacttcgcgctcaaagcgactaatatcgaccccggtcggaataatccggatgggggccttcacttgatagccatttaaggtttgagaaacccgctctgatggtgccacgatgcctgacatgtgatataaaaaggcctttgtcatttgcttaacatggtatggccgtaataacttcccgtttaaaacatagtgtaaataatcctcgtacatcgtatgatacgtatgtaaacaaggaatttttaaatttttagcgacaaacttcccgatgtagcccatcgaaaattcggtctgggtatgcacgatatcgagatccaattccttagccacttgataagcgtgaaataagccgcgcacagcaattcgccgatccgtaaatgagacaaacgggacactagcaaaccggaaaatattcggttcgactgcatctttgtcaacatgtggatcggtcgttgtaaatatgtagaccgaatgcccttgtttttctagggcttcttttaatgttttaatggaggttgccacaccactgacttgtggaaagtaggtgtccgtaaatatcccaatattcaattggtttcctcctccttatctttggacatttgatttcattataataattacatcgcctagatgcaatcaatgtcactaattgtaatctattcatactagcataaaaaccgtctttagacctaaaaaacagccaatttacgttaaaaaacgggcactgcacagtttttgtgcggcgcccgtttttttattttagcgtaaccaatacgtaattgagaagattattaaacaccaaatcggtaatgccactaacaggccgttgcgaatacccataaaaaatttcatcatcccacctcatttcataaaccaatacgaacagcttgctatttagggtcactgtctactatgataaaggtaagtttaggcttcatttattaagaactaccgtgcttttacttaagaatgattaaaggagcaagcgatgcaaacttatctcattaaaaaacctcaaaaactcgaattaacctatgacgaaaatatcctaacaattcactatcccggactgtttaagaagaaacaaaaccaggatcgtgacattccgtttagcaaattaaaatcagtccgcttttttgaagcgacttatcggcatggtcatctccaaattctctaccaaaaacccaaccacgccctcgaaaaaatcgtcatcagtttcgaacccgacgataacctcgctgtgcgcaagttatacacagccttagcggactatctcgaaaaaccaaccgttgaagaagacctcagttatgttaagaccggtgatcttatcatggcttacctcaaaatgcgcgacgacggcctaatgacccacgaagaattcgaagaaaaaaagaaaagaatactaggaatggaatagagtgcgcagtaagcccgtttatcttctgaggattagcttaatcaggcggattgccgacaaagtcggtgatttgactgatgtcgctaaccggaagaagatggcttacggagcacgtttcaaaatagagtgcgacggcagacgattatacgctggggattagcctaatctcgtgaataagcgacgacgtcgattgtttgcgggacgtagctaaccggaagcggatgtctgtcggagcacgttttaaatcagagtgcgcagtaagcccggttatcttctgcggattagcctaattcaccacaaaaaaaagggccaacgacaaacatgtttgtcgttggccctttttttaatcctcgcgagatactgagctaataaaccactctttatttctttataaaaccaattgccatcccgatgattaagatgaccaacacaataaccgtaatccaaacgtagaggtaatccccttctttagcaaatgcgtagattgataccaccacacgcaagactggcgttaaaatgaggcagaataagcccaacataatcacagcgccagccttaaatgcagcaatgccactgaaaatttcggtaaaggtcgttggaaattgatattctgaataacctgtaccgccatgaataatcgcaagtaacatgccaataatgagcagcgttgctgaaaccgccaccccaatgcgtaaaattttaccgatgacgagttcaatttgagccatctctgcttttttatctgtcattaaatatgcaccccgaatcctttaagcaccatttgtaaacctgtgtataacaaaatggggataaaaatcatgcgaatcacacgtggttgcaaatactgcataatccgtgaacccacagtggaacctaccaaaattccgattgctaacggtgcagcaacgctgggaataatcgcaccgctgaagaaataaacagtggccgaagctgctgccgtaacccccatcatcaaattactcgtggcacttgatggtttcaatggcatcttcataatcgtatccatggcggtcactttgaataccccactcccgataccgagcaagccagaagcaatgccggccccgaacatcatggcaaagccgcctggtacttgttcaacagcgtagtcgacttgttcttggttggccttatcgtagtaagtgccatttaagttcaacttcttggcccacttatcttcaccagcgccgacgtgttgttctgcaactttaccacgtaatttttgaatcatgttgtacgttgaaaatagcaagaatgcgccgaataagatgaataagaatccagttggtacgatgccggtcaataacgccccgataatcgccccgacggtcgttgcaatttctaggaacatcgccactcgtaagttgagcatatcatctttcaaataggcgatagttgcaccagaacttgttgcaatcacggcaataatgctggccccaatcgcgtatttaatatctaggccaatcgctagcgttaatacgggggttacaatgatcccgccaccaatccctaagattgaacccaacacgccggctaaaacaccgacggcaagtaataaaataatttgttgcatctcttttctcctcttaatgcatttttataaccgtttttcgcctgttagtgcacggagttccgttaaatcctgactgacttctaaacagcctaagtattgtccctgtggatcacgaaccgcaaaatagcgaatatagacgaacatcccgcggaagttcaaccaaaaatcagcatgatcttctcgccccgcatgaaagtccgctaaaattttctcaaccttatccacactctttggtggatggcagttcacaaccgcgcggccaatcactgcccgggttcttgggaaaatacgatgctcgttatctgagaaccactgcacaatatcgttttgatcgacaaaggttaaatcaagcggtagtacttggagaatcgccgtcaattcactaatattcatcgacccagatggtagaacgattttagcttggttatccacgccaatttcgatatggggttgtggtgcttctcgacgtgcttgaaccttcgcttttggtgccgcttctttttcgtcagctaacactgccttcacaaaatcaggcatttctggttttccttcatctttttcagcgggggcttttggtacaggttgtccgtgaatttcaaacggaatattagccgctgccgccatcgaagttggtgccggttctggtggcgttgtttgggtcgtcatttgcgcatccgccaacgattgcgccatcgcattcagttcttgcgcaatcttcggcacggtccgcttttcggccgccgcaatagcttcagcacttggttgccatggtaatgggtctggaattaaggtatacccgattggttggctttcaaaagcaattagtccccagtcagctggtgtaaagacttcattaaccatcggaatcatgatttcttcttctttgaaaatcatttcttgaatttctttactcatcttttcaacggctgcttcaattgcatatttatccggaattggttccgcagttaccatttgataggccgtcttcaccaacccccgaatttgatcatccacaccccacatcactttgggtggtgcagtaattccatattgatccatcaacggaaaaattaagttttctttccgtaaatagtggcggtcgatcaactgtaaatcttttaacgcttgttgcatccgcacgagataattttgatcagtccctgactgctgccatttcttcaaacatggcagtaattcatcatttaagagcgagttcatgaccaaattttctaatttcatcacagcgactgggtgtcctggctgttcttgttccggcgtttcagccccgtttgaattaatcgcccccttgaaaaccgcagcatggacattacacaaatgttgaatctccatcgggttcaagccactggcaatcaattcccgttcagcagacgtaatttcagacacatcaaccccagagaaggactcatcaaaaatccgcttagcctcttcaaacgagccaccttcatgcagcatttttaagatctccacgattcgtttttggcggtacgcactgctatactgttgctcagtcatcagctaacacctcgaatccttgtgcttctagactagcgataatcgtcgtcaaaggaatttgcttcatcttagcccctttaggcaatgtcataaaacgccccgcagtattcaaaagcgctgggttcgtgaccccatcaagtccgatttcaacaagcactggcaccacttcaggataggccgttaccaattcataaacggtttgacttaatttaatttgttttgccatcataatctccttagtcagcgttatttttcaatccagccaccatcaattggaacgacggtaccatgaatgtaatccgcaacctcactcgccaagtaaacacttaagttcgcaacttcagttggttgcgcccaacgccccgctggtgtctgacgggcaacttcttgtgccatctcaccagtccccgcaaaatcggctgcgttcatcggcgtctcaatcgcacctggggcgatacagttggcgcgaatccctttagcggcgtaatcataatcaagctgctttgtatagccaatgatggcgtgtttcgatgccgtataagccgcaccaccgccaccagcaactagcccagcaatcgaagccatattaacgaataccccacgcttttgcgcaaccattgttggcaagatcgcatttgttacaagatattgactttttaaattcgttgccataattcgatcccaatccgcactactggtatcaagcgttggtgcataagcatccaacacacctgccgtgttgcagaccacatcgattgggccatattctgccagcaaagtcgctaatgtcattgttaattgcgtttcatcacaaacatcaacctgcgctgtgatgcaccgactatcaacagggacttcaatcggctggcgatcaagtgctaacaccaatgccccctctgctaaaaaagcggccacttgagcgcgcccaattcccgatgccgccccggtaattaaaatggttttagtcgctaaatctgcaaaatgccccattagtcgaccaattgccaatcatcagccaatacatcacacgatgttggttggaacattgagtatgctggtgtttcggttgttttaattaataggtagggactaattgcttgcccctcgaatgtcccatcggccacttggaaaataaataattctggaccatcccagccagtccgtaccacttttttgccagccttaattgcattaatcgcttcatcaaatcccatgatcattacctcatttaacttaattttttaaaatgttgaacaatcaaccttatatgatattctagcacgccactcaaatcggtaccaattaaaatcacaggcaattcgattcaaaaaaggtgtgcccaatattggtcacaccttcctgaagttaatttgatttgcgtttaaacacacgcttaatcacatcccagacccctagtgattgaactaagcgttctgcgggcacatactcgcgaatggcgcggagtacttttttgggttcctttgaagcaaaagtatacgtcccatttttctttgtttggatagcatagcggggaatccacttgcctttgaacatgactgatgcaatcacatagtcaacttcttcccatggaatttgaataaattgtcgtgcgtcacgatcattgaaaaattcaaaccctctatccccgatcatgatttgtccataatcagagagtgctgtaaacgacgtggctttaatcactaagtccacctttgtattaatcgattgaaccataatatcgactccatttccaaaaacttactttcattatacgcttttataaaaaggaggggctaggacaaattgactttgtcctagcccctcctttgttttctaaacgtgcttcagtaggcatattcctgcggttaaccaaatttgccaaatcaccgactttgttggtaattcgcctgattaggctaatcctcaaaatataggcgcctgcttatgcactcttttacattaagtgtaatagatggaagacaattccgactacgaataagccaagaataatcacgattggtgagactttcttcttaagtaaccacatacagaataatgttaatcctaatgcagctaacccaggaattaaactatccaagttgtcttgcaacgttgtcactttattgcttgtcaatgacaaaccttgagcttgttgttgtaaggctgattggatacccttagcaccgctaggtaatttatcccagtcgatgaatgcgcctttgtccaacttaacagatgaaacaactggcgtaaacttgacagatacccaacggttaaccaacgaacctaagatgaacatcccaaggattgaagcaccctttgtgatgtcttgcaaaataccaccagataaatcttctgtaatctttgaaccagcacggtagccgaattcttgtgtataccacatgaatgacatccggatagcattccaagcgataaagtaaatgattgggccaagaatgttaccactcatagcaagtgaagcagccaaagcaccgatgattggtttaacagtgaaccagaatacgggatcgccgataccagccaaaggtcccatcatcccaactttaaccccttgaattgtaacatcatcaattggtgcaccattagcacgttcttcttcaagtgccaaagttaccccgatgattggtgaagcaacataaggatgagtattaaagaattccatgtgacgaactaaagcagctgcccggtcttcttttgttttgtataatttcttaattgctgggattaatgagtaagcccaaccaccattttgcatacgttcgtagttccaagaaccttgaaggaaagttgaacgtagccaaacagaaatacgatctttacgcgttaattttaattgttctgccataattgttagcctccttcttagtagttgtcgataatatcgccaagtgggtcaccagtatttgaaccgccgccattacctgagccgccttgttttgaaagggctaagtataatagggcaagtgaaacaccgattgcaccaaggccgataagtgtcaattgtgagatagtagcaagtacgaaaccaattgcgaagaatggccatacttctttagttgccatcatgttgataaccattgcgtaaccaacggcaacgaccatcccaccaccgattgctaaaccgtctgttaaccagattggcattgctgtcaacatttctttaacagggccagcaccgattgctaagattaagcctgcaggaatagcgattcgtaaaccttgcatgataatagcgatatattgccacatttcgatcttacggaagttaccttctttagcagcagcatccatgatgtgcacgataccagttgctaatgtccgtacgatgattgttaataataacccggctacggcaagaggaacagcgatagcgatagctgatgtaacgccggcttttccttggccaccaagtattaaaataattgcagatgcgattgatgccaaagcagcatcgggtgcaacagcggcaccaatgttagcccaacctaaggcgatcatttgtaatgtcccacctaagataagacaaggtagtaattgaccggttacaagaccgattagtgtacaagcaataactggctgatggaaatggaattgatctaagataccttccataccagctagaaatgcgataaaaatgaccaaaatcacttgaatgaaattcaaatccatgattattaatcctccaatttcttctgatgttatttgttattttgtttgtctagttctgcttgtgcttttttaaggatactatccatgttaccgtttgagtcacttggcactttacgaacatcgaacttgatgcccttagcttttagtttttcaaaggtatcaatatcatcttggtcaaaagccaaaacagtatttggttgcactttaccagttgagtgcgccattgaaccaacgttaattgtttctaatggaacgccaccttcaactgctctaagtgcatcttgtggtgattcaaataataacaaagcacgttccttaccaaagtgttggtcatcttttgccaatttaatcatttgatcaactggcacgacgtgtgctttgatgccactaggagcagcttgtttaattaagtttgtccgtaattcatctttagcaacgttatctgaaacaacgataatccgtgttgggttagttgtcttcgaccatgtcgttgcaacttgaccatgtaataaacgtgaatcaattcgtgccaagacatatttgaacttaccaggtgtgcctgagtttgaagtcgtttgtgcggcttctgccttaggtgcttcttctggttgtagttcttcaggtttaacccgtacccctgctttagcttcatcaatgatatgtgctgcgatttcatgagcagatgtcatagataaacgagatgcgtaagcttcaatcaacattggtaagtttaatcctgtaacgattgcccacttatctttatgtgcttcgaacaacccattagcttgattaaatggtgaacctccccaaagatcaactaagaataagacgtcatcatctgcatcaaacgttgcaacggcagcttctaaatgcgctttcaaatcatctggtccttcatttggcataaaagtaacagcttgtactttttcttgttcgccaaaaatcattgagccagattgcatgattcctttagcaaactccccgtgacttgcaataacgattccaaccattcacaaaaacctccttaataaaaatagttgtcatactcatcaataaaacgctatcaattaatataaaaaaataatggcttaaacattattgactgagttaacagttccacgtttttattttttaaaacgctttactgaattaattttaccacaaaattctaatctgtctaatcattttttagattatctgcgaaattggtctagataatcgacaaaaaagcgctaaaagtcgcattacttaagcttttaatttataaaacaatacgaataattttatttttgaggtaataagatatataatggcactaacttgtcgtttaatattcataaaaattatgggggagtagctgtgataaaaatcaagataactagtcttgtcattgggttgattttgggggcaggcttagggttatatggcaatattggtgatgatgttatggctgcaaaaactgatagtcaaacaactaagacagtaaagcaggcaaaatcattaagtcaacagtaccaatataaagaagcaaaatcagtgttatcggggcacaaaggaacaacagttgatcatctaaaaaagagtattaataagcaacagtcaaagttggtcacgtggaatgatccgacaaaaatttcacatcttttttatcattcactaattgttgatcctggtaaagctttctcatctaagcaggcacagggatacaaagattatatggtgaccatcgacgaatttatgccgatgctgaatcagttatatgataatggctatgtattaattaactttaaagatatcatttcgattgataaacaagggaaggtgactttcaaaccagtcaaattacctgaaggcaagaagcctttaattatatcacaggatgatgttaactattatgagtatatgaagaattctggatttgcagataaattagtcgtcaataagcaaggtgatgttaaaaatcaatataccaataatggtcagaagaaaattggtgattatgacatggtaccgattattgataccttcatcaaaaagcatccagatttctcatacggtggctcaaagggtgtgattgctgaaacgggttataatggggcgctaggttatcgttcatcaaagagtcaatatggtgatacaaaaaagacacatcgcgaagctaagaaagcgacaaaggttgctaacgctatgaaaaaggaaggttggcagtttacatcgcattcctggggtcatataaatatgactacggccagtgttgatgatatcaaaaaggacactgcactttggcaaaaggaagtacaaccaattgttggtaaaacaccagtattgattttcccatttggagcagatattggctcatttacaaattatacaaatgataatgtaaagtacacttatcttaagagtagcggtttcagtattttcgataatgttgatgcgtcacagacagcatggggtcaattaacaaatgattattatcgtaatgcgcggataaatgtcgatggtattcgtttacatgaaacaatgactggtgagaacacggttctaaatgacttctttaatacaaaagatttttatcatcgtgataaataatgaagagcgcgagacaaaagtcgtcaacaaaaaattgggttatttttcaaacagttagacaacactatcactcttcatcaacgtaagttagatttgttgaaagaacagaaaaaaggctttttacaaaagatgttcgtttagggtctaaaattataaaacaggccgagcacgataaaaaaataagagatcaagcacgaaaagaagcacttgctgaactccaaaaggggtttggaaatcatgcctaaaactattaagggacttgctgatgagtttggtgtatcaaaacaagccattagggaaaaaactagatgcaaactttagttgttgttaattcgagatattttctgttaaagcaacattcattggtggcaacaaccagaaccaaatcaattatagtttagcttgaagattgatacctaaagaaaaccaatcgacaagcaaaacttaaacttggttgtcgattggttttcttgtcgtttttaacttataatttaaggcggattaattaggcggtgaaactattgggcaagactattcggcaactttcagaagaatttaaattgtcaaaacaagctattaatcaacgtattaatagcattaatggttttcgaagcaaacacacttacaaagttaaaaaccatctagaaatagacaaccaaggcgttaaaatgcttgctaattttgacaagcaaaaacgacaagaacgacaaccaaatcggcaagctgaaaacgacaaggacaaaaatattgatcaaatcttgctgaagcaacttgatgttaaagatcaacaaattgcaaatttacaacaagccttagatcagcagcaaaaattacagatagcaacggttgcagagaaccatcgattaaaagaacacgttcagaaactgagtggcttgtttgaatcttctagtgctactcatcagcaacaattaaacgacaaggacgataccttgacgaatagttctaataccaatcacatcaaggataaaaacgataatcaaaatgaaaataaagttgctgaatatggtaatagacaaaagaaaacatttaagaacaacaccaataatagttggtggcatttttggtgacaatctaccacataataataattattttcacccaatgcatcaaaaataattaaagaccctgctaagagggtctttagattaattatttagaattgttaacaactgtatctgcatgatctctggtgtcttgagcttccttaactgcttgagagagatcttgactgtcttggttcttttggtttaattgattagttaaatcattaaccttgttatttagatccgatacctgttggttagctttgtcaacttcttgttgctcagcttgaactttagctttgccatcatcaattgcctgttgaatagcttgttccttagctttaagttgctgattaaaggtgtctcggtcagatttttgtatatcttgtgcctgcttaagctgctcttgtacagatttaagttgattctgtaaggcactttgactggactgggcagcttttaattggttttgagcatcggctaaatcactcttagcgttagtcagttggtcatttttattcttgatagtttgagaaagttgatctaagtcattattaatctgaaccatattattatgaccctgccagaagttatcggcaaaggcataagccccaaatcctgcaaatcctaaagtagtagcaccaaataatgcaatagcagttttagttaattttttcattgtcttctccttatcttatttcatatattctgtaatctttaatcttccacaaaccgtccttgaaagaacgtgtttccttgcccttatacaaaaacgcctttagcaatgaaaacataagctcatctcctatgtaacaaattggtaaatccttgatacacttttaatgtaccgcaaggttgatttatcatcaatgtaaacctttacattttaaaataattttgttcattagtagattgcaaatttaatccgaatttttggacaaatttgtcagcataacctgatacggtgtttgccagtcgagtattttaagcggtcgctggttaatttggagtaacgtcgtcgttaaatcttgagcactaatgtgctcaaaacgagtccctttaggataaaaataacgtaaattccgattaaagcgttcattactaccacgttcagctggcgtataagcatggcagtaataggtcttaataccatattgtgattcaagtgatactagcccactaaactcagtgccacggtccacagtaaagctgtgcaccggaccattaaaagtggttaggaacttagttagtgcttcattaacagtcgctgtcgtccgatcttttaaccggtatgcccaaaggaaccgtgatttgcgatcgattaaagttaataaaactgccttactatgcccacgaggaccaacgactgtatctagttcaaaatcgccgatgcgcttacgttgattaatcatcatgggacgctgttcaattgatcgccccaaagattgattatatttggatcgttggtcaacgttacgccgttggcgtacgccatgttcaggtagatcattcaaggagaaaccaattctcccctgatttagccaattataaatagatttagtagctagtttaaattcgtgagcaatcattcctggtgaccagcttagacgtaaatggttgagaattttttgctttaactcatcgctcagcttagttttccgaccacatcgtgatcgcttgtattcggcatctgtttgtgctaattcagcctgataaggttgacatcgagataattcataagaaattgttgacggtgatcggttcagccgaacgcccatttggatattggacagccctagttcacaaaaggtttcgattttaattcgttcggaataggttatactagacaaaagatcagctcctaaaagatgggtttgtggtaaacaccattttaaaggaagctgatcttttttgtccgaacagcgttcggattaattttacaatctacccgatatcgaataaaagttgtccgcttttatgtaagcgcaaggaaactcgttcttttaaggacgtgctgaattgcgctatttttacgccgtaggtactttacacatagcataattaagaatatgctataactgcttgcttggcctaatcaggtacttgtaagcgctgaactgtgttatactagcggcgtagctattgatcattgttcaggtaatacaaggaggttttgctgatgaccacacactatgcagcacaaattgtaccattgaatgcggataagattggaacggctgcttatggcgaagcgacgttcgcaattgcagatgatgaattaacgattaagatcacaatgcacaacacgccggccaatatgcagcattgggaacattttcatggctttccggatggtaagcaggcgttgatcgcaacggctgcacaggatgcgaatgcagatggttttgttgatctcatggagactgaagccgtttcggggacgacgatggtaccttttgacgatgccccagaacatatggatattccccatgaccgctatccaactgcggatgagcacggtgattttacttatgagaagaaagtcccattaagtgagctacaagctaactttaaaaaagcatttggtgagtcggaattacaccttgaaaaacgcgtgatctatattcacggcgtgactgctaacgtgcacttgccagaaagtgttgccggaatggtcggccactatgatgcacacgttacgttaccgatcgcgactggtcagatcgttgcggttgattaataagcctaaaaaataaggaagttggcccgattggtcaacttccttattttttatcagctattgatcggcaacttttttcaataatcgtttcatctccgtgatctcttcacgttgcgttttagcgatcttctgtgcgagggctttgacttccggatccctgagttgcgcgcgttcactggttagaatcgcggtcgagtgatgggggatcatttcttgcatccaagctgcatcgtgcacggtcgcttggctacgaactagataaagcgagccagcaaatatcaccgcactaccaagtaggatcaggcggttcaaacgtttattctggtacattgaccacatgaataacagcattacaatggccatggtggcgcccataattagcgccatatacagtcgcgtttggcttagaaaaatatgatctaattggaacacattaaggtacattaacccatacataataactgtagagacaagaatcatcagtaaaaatttcgtgtattgtttcatgacgtcctcctcgctttcgctggctttattttgactataacaaaaaaaattgggtagcgtcaagaatcttgtgtaaatgaaatgccttcgtacatataatatgtatctaacttaaataaatgatgcttccaaggtgtcctggagtcctttgaaccctcgttggatccgcttcagagacttctcgttataaacattaaactgagaaaccaggaagcgatccagtgaatcttccgttggaaattgttctttgtgatgggtggtgcgcttgagatgcttattaaagttctcaatcaggttagtggagtatagtgattgccggatagctggtggaaagtccatgaaagtgagtaaattcggcattttaagcagatctttgattaatttgggataggtctgatgccagttgttggcgaactcattcagtttcagttcggctgcttcacggttggcggcccgatgaacttgtttaaagtcactgatcacggccttgcggtcttttacgcgaactttgttcatcagattccgcccaacatgaaccaggcaacgttgtcgtttggctttagggaaatgccgattcaagccttcatccaaaccaactaacccatcggccacaaacaacagcacatctttaacgccctgcttgatcaaggttcccagcagttcagtccagattccagtcgattccgttggcgccacttggtagttcagcacttctttcgtaccatctggacgaatgccaatcgcaatatgaacggcttctttttgaacggtatcccgctttaacggcaagtaagtggcatctaagaagatggccgcatattgtgaagccagtcgacgttgctggaaagcttgaacctgttcattgacggctttagtcatgttggaaaccgtggctttggagtagtgagcaccgtacattttctcaatgagttcggcaatttcagcagtggtaattcccttggtatacaactgaatgaccgttgtttctaaattatggatctggtgcaaacagtgtgagagatgaccatctaaccagctattgatcctatgttgaaggttatgcagctaacaatgcttctaattcgtccacgactgagaacccgatgagacttaactctcgtcgggttcttttgcgtattgcgtgaacaatttccacaccgctcaacgttgcactagcggttcgaatgctttgaaagcttgctgagcggacacgatgacgtttaatgaatcggtggtcctgttcaatcaaattatttcgatatttggaacattggtgggctgatttgctcaaatagtcttgctttatcaggtgcttcactgctttcagtgttgcccgatattgatcagtgactaatcgatcaggccgaccattggtcgtcaagagacgcttcaaaaagtgataggatgcggtataatcgcggtgttttcgtagctcaaaatccatggtcaaaccgttactgtcaatagcgcgatacaaataggcccaacggcctttaactcgaatataggtctcatcgattcgccaacttttagcgtgagctgtttgatgccgacgccatagagccttaaagatggggccatagtgatgaacccaacgcatgaccgtggtgtgatgaacagtgataccccgatcccgaagcaattcaacgatgtcacgacagctgagactgaatctgaaatagtagccaacggctactaagatgatgtccttttgaaagtggcgtcccttaaagtgattcatgcgcgcaatccctcgtttcttggcacccagtatactaaaatcaagtcagcgaggaaaatttgcaccagaaccccttttaccgcaatcagcggcgtcttcgcgctcctgcgcaggcgccgctgtttcgagttcaaatcaccgctctttctctacttcgccttcctcctcaatagcaaagggtcccccgcttatagttcatctccttgctcagttttgcatttagcacgagcattgttcacagtttatcgactagaaaacgtgcacgttgcccacgccaccggcggcccaggccaaatcttttgacagcaacattaggtatcctttaaactagcaataaaaggtaactaattcaaaaaattcggttgggcggtgctcaagaaagctttctcggggaggaaagcgattcttgggtgcggccttttcttattggaggaaacttatgaccccttacaacgaacacaaagcagatgtcctaaagcgcttggccaccagccggcaaagcggcctcaccagtgaagaagcacaggcccggctcacccagcatggccccaacgccttggccgccagcaagcccctaccagcctggcgccagtttttggccaccttgaaagaacctttggtgattattttattcatcgccgtgctattggcctgggccagcgccggctatgacttcttcgtgcgccacgaccccagccatggtatggcggcagtgtatgaaagcattgcgattctgctgctgattttcgttaatgccggcctctccttctggcaagccaaaagcgcacaaaaatccctggacgccctgaaggtgatggcggatcaccacgccaaggtcctgcgcgatggcgactggctgacggtgccagccaccgagctggtgcctggcgatattgtcagtgtcaaaaccggcgacttcatcgaagccgacgttcgctggctccatgtcgccgagctgcaaaccaacgaagcccacctcaccggcgaagcggaacctgtgcaaaaacaaactcacgcattgggcgctgacgtgcaaatcggtgaccgcaccaacatgggcttttctggtgcgacagtgacgcatggtaacggactcggggtggtggttgcgaccggcatgcaaaccgagctgggcaaaatcgccaccttgctggatcaagtcaaggacaaaaagaccccgattgaacgcaccattgcgcgcctgaccaccaaactgatgatggtggcgatgatgattgtggcgttcacgttgctggtggagctcttgaaagcctatcagcaaactggcagtctctccttcgctgcgctggccgaatccctctctacggcgattgccttggcggtggccgcgattcccgatgcgctaccggcggtgctgtcaattgtgctcacggtcggggccacgatgctggccaaaaacaacggtctgatcaagtccctgaacagtgtggaaaccctaggggccaccagctacattgcctcagataaaactggtaccttgaccaaaaatgaaatgactgtcacccggttttatgccaatggcgccagttatgtggtggaaggcgacggctatgaaccagtaggcgaaatcatccctgatgacgaagccgacacccccggcttttcgcgcttcatgatggcggctgtcctgaataacgaagcagcgattcaaaccgacgacgaaggccgcagccgcccgtatggcaaccccaccgacgtagcgctggtagtgatgggccacaaatttggtatcgatcgcgatacgattttgagcaaagaccaggcgcaggacatcgacatcattcgcgaactgccgtttgacagcgaccgtaaaatgatgagtgtcgtcattaaagatggcgaccagtatcaggtgctgactaaaggtgcgccagacgtgattttagccaaaactgatgccattctggaccacgaccaactcgtaacattgccagctggtcaaactgcggtagaagcgcaggtcaaccgctttgccgaacaggcgctgcggacgctggcggtgacgctgcgtggcatcgacgaggacctggcgttgcatggtagcaccgctgagcttgagcagcacctgaccttactaggcattgccggcatcattgacccgccgcggccggaagtgcgccaaagtgtgaccaccttgcaccaagccggtattcaggtcgtgatgatcaccggcgatcacgcagtcaccgcccgcgcgattgccttaaagctgggcattgtcaccgaccctagcgcccgggtagtggaaggcaagcagctggaagccatgaccgatgaagatttgttccggctcgcgccaagcatccgcgtatacgcccgggtgtcgccggaacacaagcagcgcatcgtgcgcgccttgcagcggcatggcgaaaccgtggccatgactggtgatggcatcaatgacgcgccagccttacgcgctgctgacattggcattgccatgggcattaatggcaccgaagtcaccaaagacgccgcagatctgattttactggatgataaattcaccaccatcgagcgcagtgtccgcgccggccgcaccatttttggcaatatcaaaaactttatgcggcatgagttaaccaccaatgtcgccgaggtgttggcgctactgttcggcgtgctactgatgacgcaacccgtcggccaagtggcggccaccaccccaacattaacggcgctgatggtgctgtgggtgaacatgatttccgatgctttaccgagctttgccctcggctatgatgtgccagaagccgacctcatgaaccagccgccgcgcaatgtgaaacaatccattttgcatggcatgctcgggcgcatcttcctgcgcggtattgtgatgggtgggctcgtgtatgtcgccttcatctgggctgccagtcaaggcatgagcggcgcagaagcgcaaaccctcgcctttttgaccctggtgtttggccagctgtggcatgtgttcgacgcgcgtagcacccgcactttgttcgcccgcaacccgtttgaaaactatcagttgctgctggcagtggctttcgcagcggtggcttcattacttgtcaccatcatgccgttcttcaacgaagtgatggggaccgcgccactttctagcacgctgtatgctgcggtagtcttcatcccggcgctaccgaccctcattttgtctggaatcaaagaactgtggctgcgttggcatcgcccgccggtagccccagagcatgattaaagattgttttttcgggccagattgcctacaatcagggtaaccatatcgaggtgagccagttgaatgtttatcggatctggtgcaaacagtgtgagagatgaccatctaaccagctattgatcctatgttgaaggttatgcagctaacaatgcttctaattcgtccacgactgagaacccgatgagacttaactctcgtcgggttcttttgcgtattgcgtgaacaatttccacaccgctcaacgttgcactagcggttcgaatgctttgaaagcttgctgagcggacacgatgacgtttaatgaatcggtggtcctgttcaatcaaattatttcgatatttggaacattggtgggctgatttgctcaaatagtcttgctttatcaggtgcttcactgctttcagtgttgcccgatattgatcagtgactaatcgatcaggccgaccattggtcgtcaagagacgcttcaaaaagtgataggatgcggtataatcgcggtgttttcgtagctcaaaatccatggtcaaaccgttactgtcaatagcgcgatacaaataggcccaacggcctttaactcgaatataggtctcatcgattcgccaacttttagcgtgagctgtttgatgccgacgccatagagccttaaagatggggccatagtgatgaacccaacgcatgaccgtggtgtgatgaacagtgataccccgatcccgaagcaattcaacgatgtcacgatagctgagactgaatctgaaatagtagccaacggctactaagatgatgtccttttgaaagtggcgtcccttaaagtgattcatgcgcgcaatccctcgtttcttggcacccagtatactaaaatcaagtcagcgaggaaaatttgcaccagaacccaacaaaccctttcaggataaattgccgttaattagtatatcaaaatataatatgtaactaggtagattgtaaaatgatcatgatgtatacacagtcagggtgtcattcttgtatgacatctcgtcgatggtttaataaacacggaatcagattccaagaaaaaaactttagtaaacaccctccaaaactataaataaagaaaatagggtccctattttcttttaataccgtatttcacacggtatcgaataaaggttgtccgcttaatcccagtatttcgagccacatccacatcgctcataccattttgataaagtttaaaggcatgtaacaaacggggatcatcttcagcgtattgaggcttgcgaccatgatatttgccctgctgtttggctagggaaatcccttgttgctggcgctcaatgattcgcttacgttcactttcggcctgatacttatagagttcaataatcaagttggtcatcagttgacgtaaatttgggtcagcaatccctgtcatggacggcaaatttaacacatctagggtggcacccttattttgaatggagttcatgatcttagtcaaatcatggttgtttctgcctaagcgatctaattcagtgaccattacaatatcaccctcacgaatataggccagcattttttgcagttctggccgattagtgttagccccacttaatttatccgtaaataatttatcaacgtcttttaaagccgctaactgtcgatctaaatgttgctccttggaactcacacgcgcataaccgattttagccatttccaattctccttttggacagttctaatgaacacttgtaattcctagtatagcacagaaataaaaaaggccaatagggtataccctagtggccgcttttgatccattatcaatggctttttaaattagggcctagtacttttggaatggaaatactttccaacaccaaaaattctagacccgattatttttgttaaacgagatttctatatataatggaattataaatttactgttggaggtttttatgactgatttatttgcagatgggactatctctatccatggagctcaagaaaataacttaaaggatgtcagtttagatattcctaagcataaaacgactgtatttgctggtctttctgggtctggtaaatcctctttagtttttgatacattagccgctgtttcccgacgtgaattgaatgaaacttttcctagtttcacccaacaatatttgcctaaatacggtcaacctgaagtgaaccgaatcgacaacttaccagtggcaattgtggttgaacagaagtctattggtcgtaattctcgatctactctggcaacctacaccggcatctattccgtcttacgtttgatgttttctcgaattggacagccttgggttgggtattctgaatggttttcctttaacctacctcagggaatgtgtccaaaatgtcagggattaggctttgttgacgacatagatgaacgtcaattaattgatcctaataaatcactcaatgaaggtgcaatgacttttgccggttttcaaccgggaacttggcgttggaaggaatatggcaacagtggattatttgatttagacaaaaaaattaaagactacaccgatgaagaatatgatttattcatgcacgctccgcaacaaaaattaaaaaatccaccggcaaattggggccgtacggcattatatgaaggactagttccacgtatgcttcgctctgttattcatagtgcctcaggtcgtcatcatgaagctgccttatcaaagattgtcactcgaaaaccttgcccagtatgtcatggaacacgtctgaacaaaaaggctctaactggtaaaattgctggcaaaaatattgcagaagtcagcgatatggatttagtaagtgtcctaaaatttttggataatatctcggaccccaaggctaaaacaatggtgcgtgaactacatagtaaagttcaagctttggtcgacatcggtttaggttatctttcccttggccgtggaactgatactctatctggtggagaagctcaacgaattaaaattgccaaatatttgacgagttccctatccgatttagtttacgtactcgatgaaccaagtgtaggactccatcctcacgatattaaattaattacccaatccttaaaaaagctcaaggaacatggcaataccattatcctagttgatcacaaccctgccattatttcgacagcagattatgtcgtggaaatgggaccacaagccggcaaaaatggtggtcaagtaactttcactggtacctacgacgaactattacggtcagatacgattacgggtaaaatgttacgagaaaaaatcactttcccaaagcctcgtgaacctcaatcttggctaaatgttaatcatgtaacttctcataatttaaaagacgtatctaccagaatccctcaaggtgtaatgaccgtgatatctggaccagcaggttctggaaaaagtactttagtccaagctttcaaacaacaagtttctgatcaagactatattgatttgagtcaggattctgtaggtttgaatattcgttctacacctgcaacttacttgaacattttaaatcctctacgaaagcttttcagtaaagccaacaatggcgtttcaacacaactatttagttataacggtaaaggtgcttgtccccgttgcaaaggtaaaggtgtgatgatcaccgagatggcattcatggatccaatcgttcaagcatgtgagttgtgtcatgggaaacgttatagccaagaagcactacaatacacttatcatggcaaagatatttctgaggttctaaatctttctatcaacgacactttagagtttttcaaagatgtgccagatatctacaaaaaggttagtctactccaccaagttggacttggttatttgaatcttagccagtcgatgaccactttatctggtggtgaagtgcaacgtgttaagttagcaatggaattgaatcataccggccgaatctatttcttagatgaaccaacaaccggattgcacttacaggatactcaacaattgatcgatttatttgaaggattggttgataagggcaatacattaattctgattgaacataatctgaaattaatttcacgagccgattggttagtcgatatgggacccgatgctggtaaattcggcggtcaagtttgttttgaaggtcatccaaaagatagcctaaacgataaaaactctcggactggtgctgcattagcagctataatttcttaaaagattcaaaaagatcacctcaagttaaacgaagtttctcagttgagtttaaagttgatgtgataaactactatcaaactcatgatgaaactttagccgaagtatccgcaaaatttgatgttaattcttgtcaaatcagtctttggaggacagccttcaatcagtatggtatagaagccttgagcctcatccgaaaggcagaaaaaccaaagtgaaacataataagaagaaattacgtaagttagtaaacaagaacgaaatcgatcaacttcgtgaagaattgacgaaaaagaatcaagaattatatgatgcaaaatttgctcttatggtagattgtctacttttgtctagttatatttaacaccaaaggctactaccacgggtttaaagctaattcacgtaggtttacattggataaaccaataatggcttgtcctattcaattactaatccataaactagcctgcgaaattttgcgcaacctacttataaacaagcaactcttgattattatagctttcggcaaaagctaataacgcccggccgaaaggtttaaccttttttgttaccatcagttttttccaagagagagtagtgattaacctgcagctattagctaatgagatacttagtgttactcaggatgtttacgtggcctatgaagaaccctactagctgtgagtaggattaagctaagtaaaatatagcgcatcgtaattaaaaagccgtttaacagtcccttatgggatggttaaacggctttttgctatgctaaggcgtcattttctgtttcctgataacgttgcaagatgtagattgctaggataactagaattgcaccactcatttctacccaactaaagcgggcatggaagaagatgatacttagaataaatgtaattacaggttgtacggcatcaacgatactgattacggttgatggtgcaaagtttaaactgtgtaacaagcaaagatatgcgaatacagttccaatcaaaataacggctaaaattgcgataataccggaagcatttaaacgcggcggtgcttgccagaatggtcggtggatattgaagagtaaaccactgatgaacatgccccaacctaaaacgagaattggtgatttttcattaacgattggtcttggtagcacaacgtagaaagcagctgttacaccggataagattccccagattaatgaattaaaaggaattgttaaagtatggatattgcctttcgtaatagaaaggaaaacgccaattaaagcaattccgaatgagataatatcaattcgatttggccacttacgtaagaaagcgagggttccaataacgataaacagaggacttagatattgtaaaatagtcgccgctgctgcattccccgtttggatactcatgaagaaagtatattgattacccatgataccgaaaagggcgtaagcgattagccaagccgttaatcgttttgatttaaaaatggagaagatatcttgtttgaacttaattgccccgataagtaataaaattaaaccagcgccaagcgttctaacggataggaaccaagttgcagggatcttttgtccttgcgagatgaattccaaaatagtacctgaaacgccccagagtgcggacgccatagtcgcccaaaacatgcctttggcgatgttttgcggttgagttcgattgttcattgtgcgccatccttttttgaaaatttataactatactattataagctaaatggcgtatttatgctatttgcaaaacttttttcattattattccccacaaaataataaatatggcagtgataaagcgaactggtcaacaaaagctaattaagttatgatgaataaaaaagtgagggattcagatgcaatacattgcgttattacggggaattaatgtgggtggtaaacggccagttaaaatgagcgtgcttaaaactgcgtatgaagcggctgggttcaccaatgtgcaaacatacatcaatagtggcaacgtgttatttgaagccccagaaacaggcttaacaaccttagcggcaacttgtgatcagattatggtggagacctttggcttttctgtgaatatcgccgtggtcacagctgaccagttgattcaagctgttgcggacgcaccaacttggtggggcaatatgccagatgtgaaacataatttaatcgtggcgattgcgcctaaaacgggggcggaattgagtgtacatgtaggggcaattaagccagcgtatgaaaaagttgccgtgaatggtccgtttattttctggagtgcacccgtgaaaacattcggtcggacgcggtggtcgactgttgctaaaggggacctataccagtggctgacaattcggaatgccaacaccgctcgtaaattagtggcactcgcacaggcactacgggaagcatgaagtggttagactcgcatcttcattaatattcatatatacttatagtaataatcaataaagaaatgagggacgcgatgcgcttatccaatttgaaacagacgattatccagatggggttgatcttgattgctctcgaaattattgcgattgggattcaactcttctttgccccccatgaagtagcagccggtggggcaaccggtgtggggatcttattagaagaattgatggggtggaagatatcaacagtggtgtttgtgattaacatcggcatgctgatacttgcttacttcttacttgataagaaaaccacgttaagaattctctttggtagttttatgctaccagtttgtttagctttaacgccccaaatgatggtggtggaagacaaactattagcaattattatcgggagtgttgtttacgctgccggaattgccttgttatatcgaattgatgcctcgagtggtggctcaacagtgccaccgttaattttcaaaaaatatttcaatatcaaaccggcattgagtttgctggtagttgatttactagtctgctttgcgaatgtgttcgtctctggttttgagacgttcatgctggcaacttgttcatcaattctgacgttgattacgatgaactatattgagaccgggttgaaccggaaaaaggtcctctatgtcatgagtaacgaccaattacctgaaattaaagcccatttaatcgaagaatctgatgtgggcgtgacgatttttgatgttactgggggctattctaatgacaataagcagatgttgatgctcgttgttgaaaatcaagcctatcaacacattattaatcgaattcatgaagttgatcctttggcatttacgattgtggctaacgtagccgaggtacgcggcggtagtttataaatttaaaaagggtcgagacaattgtctcgacccttttgtgtgttattgatgattaaagtagcgatcagcttttaaattattgatggtgagcatgataatcaagctgatgatatagagtgttgaaatgaagagcatcacggtcatcaccgaataatgatcaagtaaccaaccgataatcacgctcgaaaatccaccgatacagcggccaacgttcataatcacgttattggcggttgcacggacttcggatgggtagaggcgactgacaatcgcgccatagcctgcaaacataccatttgagaagtagccgacaattgcaccgacgaacaataaagcacccatgctattggggaaggttaagatgtaaacgcctgctgctgaagcaatcaggaataagacaaaagcaaaccgtggaccaattcggtctagaatccaaccgaaagtcaacatgcctgctgacatcccggcaatcgtcgctaacatccaagttgatgaaccagccacactgaggtgcatttgttgttgcatgatggttggtaaccagttcattaaaccgaagtaaccagcgatttggacgattgccattatcatcagcgcaactgtttggtaagctagttcgcgtgttttaaaaagagcgctaatctgaccttttggttgatctgattcagaagtgaacgttgtactttcgactagatgatggcggataaaaaaagtaatgataacaggtaataggccgaatagaaatagtgcatgccaaccaaattgtggtaagacccacgctgctagaagtgccgcggcaatagcgccaagttgacctgcgacacccacgaaggatgaaacacgtccgagctgtttcttagggaaagattcggctaagaccgtcatgccaatcccatattcgccaccagcaccgatcccagctaagaagcgacagagataaatcatgggaagggtgtgggcaaatgacatagccgctgtcgcaaaagcaaagataaaaatggtgtaagtgaatgttttaatccgtccaacgcggtcggctaaaacgccaaaaaaaacgccacctaacaacattccaatattggtaatcgttgcgattaatcccgcctgtgttccactgagatgtaaatctgcaatgatggacgatagggtgaaagacaagaacataacgtccatgttttcgagaccgaagccggccgttgttgaggcgaccaccttagtctggtagcttgttaatcgatgttggctgtgtgccgtaatagttttcatattcagttttcctccaaaaaggacgctctctgtcgtcccttattttgcttggtgccaatcttagcacaggaaagtagtctgtgcaagggtgttatggaaaaagcgcaagcgtcctttgtgatataattgagtttataaaatggctcttcagcgatggagggcgtcatggaggctattgaatgactgataagaaaaaacactttacttttccgagcgcctacacagtaattctacttgttttactggcagtgatgatcttgacgtactttatgccagccggaaaatatgcgagtttacaatataacacgacccaggaaaacttcactgtggtcgcacccaatgggcatgaatcgacagcacctgggacacaagcaacactgaagaaataccatgttaatacggatttagcgaagtttaaggatggatcggtgtataaaccagttgcgattccaaatacatatcaaaaactcaatcaacataaaccaaacttatttggcgcgattaaacaatttctgaacgcacccattcaagggttatctgaaacaatcgatattatcacatttgtcttaattctaggtgggattgtgggcgttgtgaataagaccggtgcatttgcggccggaatggcggcgctatcgaaacgtttgaaaggtaaagaagcctggttaatcgtgattgtaacgagcttgattgccctaggcgggaccacctttggcttggctgaagaaacaattgctttctatccaattctagtgccaatctttatggcagctggctacgatgcgctagtcgcaattgcggcgatttatctaggcagttcaatcgggacaatggcttcaacggtgaacccattttccgtcgtgattgcttctaatacggctggcattagctttacagatggtatgggactaaggcttgtaatgctgattctaggcacattaatctgtattttctacacgattcggtatgctgaaaaagtaaaacaggatccaagccaatcgctcatttataatcaaaaagcagaattggaaaaacatttccttggaaatagtgatgtcaatgaagtaccacggtttgatttccggaagaaattgatgttaattatttttgcggccggttttgtcatcatggtcttcggcgtgaaggaatggggttggctatttaatgaaatttcctcgttattcttagcgattacgtttattttggcgtttatttccggattatcggaaaaagattttgttagtgaattcgttgcaggggcttccgacctgttaggtgtagcccttgtgattgctttagcacgcggcgtgacgattattatggaacaggcacaaattagtgatacgctattgtactggttaagtagtggcgtttcccatatgagtggtgttatcttctcaacggtgatgttcttcgttttcattctactaggattcttcattccgtcgagttccggtctagcggtgctatcaatgcccgtcatggcaccgttggctgatgtagtcggtgttaatcgtgacgttattattagtgcttataactggggacaaggcattatgtcgtttatcacaccaactggtttggtcttggcctcgctggcaatggtccatgtaacgtttgataagtggttaaaattcgtttggccattaatggcgattattggtctattagcaattattttactcggtgttagtgtctatctttaaaaaaacggtcaaaaaaggtccgccacaatcgtggtggaccttttttcgtgattagtaaactttaaatttcgttactggccagtagcggagtttgacaacgccttgaatcccgttgaaggttttagaatcatcactgacaaagcctacttcttcataccggctatcctttgaaacagtccggttatcacccatgacgaagtagtggtgggcagggactgtggaacgaccaagcacgtcctttaaatcaaagtttggcttattagtctttgggttgagtgtgaagtagtttgacccggctaggaaggttgttggatcttttttatagtcatttaaataaggctcactgacttttttattattaatatagagttgatccttgttgaagcgaacagtttcaccgggcatgccgacaattcgtttaatgtagaattcacctggtgaatcaggggccttgacgataacgacgtcgccgcgtttcagtttcgtatggcgtagtgcaatgacccgatcatactgtgtaaagttgggttgcattgatggcccgaaaatttgttcattggcaatgacgaatttaagcagtaattgcgcaatgccgaccatcacggccgctaataaaatgatttgtatagtggatttccaaaattcttttgctttagctgacatatcgcacatccttagaattcaatagattcattgtactacaattaattggtagatgacaacaaaactgtacagttccttaactatttaaacgatcttttaaattagggaaacgccgcgttatttatcacgggaaacggttcgtggtatactgaaagggattattttaaacgacaggaaaagtgagtttaacgcatggcgaatttagtaattgtacgacatggcgagagtttagccaatcaattaaatacttatactggttggtctgatgtgccattaacggctgctgggcgcaaacaagcacagcatgtgggccgacaaattcaagcaaccggaattcaattcagtcatgtgcatacttcgttattgaagcgtgcaattttgacgagttacattattctggatgaaatagaccaattggccattccaatgacgaagagttggcgattaaatgagcgccattatggggcattgcgcgggttaaataaggaaaagacgcgggctatttttggtgcgcatcaagttgcccgctggcggcgtagttacacggcggtcccacctttattgacgactttttcgcaggcccgtcgttatcgactagttccaccgatgagtcggccacgcggggagagtcttgcacaggcaacgcaacggctattaccttattggcaagatcaagtagtgccaggattacttgcaggccaggaccaattgattgtagcgcatggttctactttgcgtgcgctcattaaggtgatcgaacagatttcagatcgcgatattgatggtgtggaagttgaaaatggtgaagcactgtattatcgattcgatgctcaaatggtagtcattgagaagggacgattagcggactaagcggatggacaacaaattgaaaagaggactgctgttggtagggctcatcctactaattattggcggcacgatttatcatgaacggcaaaaatatgccgtccaaactcaacaaacccaacaaaaaatgaaacaacttcagcaacaattacaggcaacaaaacttgagttagccattcaaaaggcaaaaagtcatgaagccgggattgatgatcgaaccatcaatcatttgagtgcgaaggaacaacaatttgtacagcagttgctacatgataacagttttagcgggaccattttaattgtgcggtggaatcatgtgttatttcaaggtggccggggctatgcaaattttgcgactaagcaactgaattctccacagacgacgtatcagattgcatcgattcaaaagtcattaacggctgcgttattgatgaaacaggtgcaagccgggaacatcgatttagcgacaccgttaagtcggtattacccgcagattaaagaggcggatcaaattacgctgaagatgatggttgatatgcgttctggactgactgaattatctgcaccagaaaaagaattatcagatcaagcgcggattcaatatgcgcttgatcatttggctgttaaagatattggtcagcataattattcgccagttaattaccttcttttggccgggattttagaacaagtcacccataagagttatcgagagttagttggaaatcagttgataataccgtttaaattaacatcgtttaattttatgccaaatgaaacgaccggccaacaagcgactgcttatggttatcaacaagacggctatggcacgccagttagtgaaccaagttacgtatatatgcgtgagttagggaccggaaatatgtatgccacaacgagtagcctctttcgaactgaacaggcgattgttcaaggaaaagtttttaaaaaatcgttattaaaaacgctccgctcatcgactactggtgaatatacgggtggtgtttataattacaaagattattttacaagccacggagtcgaatctggattcgaatctagcttgcagatgagtcaggatgggcgttcaggaattgtcttattatcgaatcaatataaggccaatccttcaatcggacttctaacgaatcaactttataagcagttaattacgctcaatcgttaaaaaagcagcttggcttaatgcctagctgctttttgtttggactgtaaaatgatgttgtgcaagtgtccaaaggccaaacccaattaaacagccaaaccagtttaagaggatatcactgagtgcgaaagtccctagataaaaggcgaattggagaatctcaatgcctagaatcgttaagagcgctatgatgttcgtttcaacaaatgaggctttcaaatggtacaaaccgcctaatgggatgaagtaaacgacattcagtgcggcttcgagcagtgttttgtgatccttttgaatgaaatcgaacgggttcaagctaactgcatgatagacgtttgctttagtgaataagacaatgaataataagagcagatagacgctgtagacgagataaccatagattggcgatagttgtcggcggtcccattgcacccagcccaaccaaaatgtaagggttaaaaatagaatcagaaaaagcgtcgttgctggaaaacgggccataacccgggttaagcgtggataactgttgagtgttggtaagacaatgtgccacacgaagtagcgacttatgaggtaggcgaccacaccggctaaaccatattcaagtatcttgcgcattacgattcctccagtgattatagtttggtttgggcgaggcgtttagtgaattcagccataaagtcaaaatgttgtgtgtcggctaacgtatcttctaatttatttagaagttcgttgagcgcttgttgttcgtcgggggttaggctaccgaataaagtctccgtaaattcattgcgaccatcgagggcttcttttaaaaccgctcgaccggccgctgtaatgaagacgtgggtgattcgccgatcatgatgatcgggccgccgattaatgtagtgtttagactctaatttgtgcaagcattcggttagggatgaaggccgaatatcgagactttcggcgagggctccctgcatttgtccgttttcgatattaaggcgttttagaatgcgaatttggctgactgagcgatgatcggatgaaaattgcatgccataataatggcgataatggtgaatcaccttattgaaagtttggaaaagctcgttagatagctcggtcatggggactccttaataaagtttaatttgagatgctaatacgggtataatacgtcatttcataaggtggagcaatattgctcaggttttatcaagggtgttgtgaataattttacataataaccgcaaaaaaaacgatggttaaactgagtcagttctaaccatcgttttggggttgttattgggctgcttttaagaaatttaatgcagctgcataatctggttcgtctgtttgttcgataattaattcggtgtagctaattgtaccatctgcttccaaaataaagattgagcgttgaagcgtgttgttgcttggaacgtagagttgcattgctttcccgaaactgagtgactcatcagaaaggagttgcatgttcttaacgccttctgcagcgcaccagttattttgttgttcgatggtgtttgttgaaattgtgtagaaatggacgtcttcgaattgatcgacggcttggttaaaatgctttgtttgaatgctgcaaacacgggtgtcaatgtctggcacgacgctaattaaagtccgtttaccgagcaattgcgcagaagtcaccgtttcgccagcggcatttttaaggtcaaattggggtaactgtgtgccgacggctggtggtgtgccgattgtatcgagtggttgatcatgtcttgtgatttgcatttgcataaacctcatttcataataaaagatgcttttattctaagctgattgtgctgagaacacaattaatcacgctcgaggagtatagaaaatgttacgtaaaaaaattcaagccttatacgctaaaaagacgctgaaccaaattatcaaagaggtcaatgtcaaaccgctcgtttatgaaattgtcgatgcaagtgggactgaaaccgcggttttgctaagtcatgagcaatgggtcaaaatccaagccgcgttaaccgctaacaagtagcgtgaattcccgatttagacttaatacggtaactaagctgtaacatttctgtaatagttgaatgttacacttgttcttggttggaaaaccgtacataagttaagtatttttaaaaatgataaaggggaatcattcagtgaaaaaagtcagtcgattaatgttcagtgcactagcattcttaacaattgggtcaacaatggcggttagcattggtgcagtcagtgccgatgaagttgctgatacaaaagcatcaatgacaaaccttagtgctgaaaactcggctttattagctaagttaagtgctgcacaagataaggttgcttcaatcgatagccaagtgtcaaataagaccgttgcaattgatgatgcacaaaagaacattgcatcaacggacaaagaaattactgaagtggctcaaaaaatcgttaaagttcaagctgaagtccaatctagaaaagctgctttaaaagaacaagtaattgcgcttcaaaaacgtgctggggatagtgtttctggaaatgtttacgttgacttcatcgtcaatagtgatagtttctcagatatggtcagtcgtgcttcagttgttggcaagttaaaccaagctaacaaggaagcaatggacgccgtagcgaactcagaaagtaaattagctactttaaaacaagaacaagtgactaaaaaagcaaacttagttaacacaaaagcacagttagaaaaagatcaagcacagttaacatcacttaaagcagatgcagaaaatgaacaagcaagtttccaacaagaagtggatggacataagacacagcttgctagcttacaaagtcaattagatgctcaaacagcagccgctgttgaagctgctaaaaaagaaactgaaaaagcaacaatcgcaccaacggttgcacctaaaacaggttcagacaatacaccagcaccaacggttgcacctaaaacaggttcagacaatacaccagcaccaacgcctgcaaaaacaacgacagttgcgccatctggtgcaaacactggttcattagttggcaatgccttacaattcattggcacaccgtatgcatggggtggcgcacaacctggtggttttgattgttctggtttagtttggtacgctgctaagatggccggcattagcttaccacggacatcacaagaacaaagcacggttgggacaaaagtgtcattatcagaattacaacctggtgatcttgttttctggggtggcgttggttcagcacatcacgttgggatctatatcggtggtggctcatacgttcacgcaccaacagaaggccaaaatgtaacaacgatgtcaatgcaatattacaaacctgactttggtcgtcgtttataagattaaataaaagaataaaaaagtttggcgtctgcttaaattaagccgccaaacttttttatttatttaaatcctgaatagaagagtgtgaatgaatagtgacaaaacaactattagtcattacgggcgccacgggtagtggcaaaacaacggtgagccattatttaaaagaggcctttcaaattccacaagtggttacccataccacgcggcctagacggcataatgaagtcgacggggtggattattattttgaaacaccagacaccttggcacaaaagcacctcgttgaatcggtgagctattctggctatcaatatggctcttcacatgaagcgttagatttggcgtggcaaaaagcacagctgattagcctagttgttgataccaaaggggcacagacttatttagagacgttccccgaagaagcatcggtcttgttcttaacggtttctgaaacagatgcgttgattacgcgccttgaaaaacggaaggatagtcctgaagcaattcaaaaacggattcaaagtgctgaatttaagcgggatctgatgttaccgagtcatttaaatcaacgggcaactgtgttggttaacgatgactgggaaacaactaagcaagccttagcaacattaatcgcaaccctaaaaaattgatcattgaaaataaaaaggaagcctgtcgaacgcgttcgacaggcttccttttaacgtatggttaacccttatgcaaatgagtgttggttaaccgaattggttcgtttcactttataactgagtttttgtacggcttgttcaattgtaataccacttgcgctgattttttcattgttcgttgcagttgcgataaatttttgagtttgcgtatcaagtgaaacatgataccaattattagtttgactagtaaattccatcgtaaaatctcccttcaaatgactataaatactgatagaaggctaatgaagacgatttcttaaaaatcatctgaattacatcataacgcgcatcctgagataatgcaactattttgtattcggattcattaaaatttggtgaaatttagttgtgcttagctaacggttatgggattaagggtataatggtaaatagtgtggggtaacaactaaattgaagttggtagtaacaagcgccagcgcctgacaacctagaaagcatgtgctagaatggcgtatcgattaatcgagaggagcggatgtattaaatgagcgaaataaccactgccattgccgtattacgcgcaaatgggtacaaaattaccaagcaacgccgagagatgctacagtatttatcgggatatgaaaatcgctacattcccgtgactcaaatcgacgagcatatgcgcgccatttttccgggaatgagtcacaatacgatttatcgcaacattaaagattttgaacaacttggcttagtagaacaacaaacagagggtgaacaggcccacgttaaatatcaatgcgattttgaacatcgccaccatcatcactttatttgccgccagtgtggcaaagtgattgaattgaaaatgtgtccgttagatttttttagtcagcaaattccaaattgtcaaattgaaggtcatcagttcgaactctatggcctctgtgaagactgccaagcataatagaaagggagcgttaaaatggcatatcacacaccacccattattccaccagccgccattatttcgttaattatcgcaatgagtgcgaccaacattgtggcaaatacggttaaacctgttgaaaacaccaagacagagcagtcgtcatttgtttcaagtagtagtgcaaccacaggttcaaccagcagcatgaatacatcagaaccagaatctgagtctgaatcggaatcctcatcgacctctgaatcaaccgttaattcctcttctaaggctgtttcaagtcaggatcggacggatacggatgccaactcacaatcatctgatgatgagcagacaacaacaccacaaaatgatgagtcagctaacacgaccacggcaagcagtagctctgctaacacaagtagtagcgctaaagtggtttcaagtagtagcagtgccactgctacgcagtaataatttgttttacgcgcaataagggggacatttatcgtgttaacttttttagacattattaaccattatttcggttacttaaatattaatggtcgcgttaaaaatcgccttttttcagttatttgtttaattggtgatttttatcttctatataagagtgtgacctactttaaagctcaagcggttggacgaggtgtgattaacctcctcgtctttttggtgttattctattttgcagtgatgaacctgtatttctattatcggggcaaaaatgcggtcatcgatatttcaccgtatattgaaaaagcgctgggtggtgatccaaacgcgccacatccactaaatggggtaaccgccaaaacgcaagtgatctcacaaattcaaccggccactggcttatttgaagaacaaaatctcttgcccgcgcaactgacaatggacgcggaacaaacccaacgtttaggatccttgattaacgaactgattgaatctggctatcttagcttgaattacgcaggcttaagtgataatgatatatatgaacaagcgcaacaattgcagcgaccaatttatgcgattgggaatcaagttgctttaccgttttatgaaatgaaacaagaagcagatcgttgggtgctctatggggggattaacgccattgccaaacaaccgttagcgcagattacgacggttggcttaaccccaatccaagacctagcccaagattatcaacttgcagtcgcccatacttggattacgggtggcccgaacaagatggccgggcgtagtggcgtggttgaaggcaatgatccctatcaattagtggttcagattgcgtaccaagaacgaacaaagtagtcagtggaggaaaataggtggagattcataacgaattcttagatgtcaattattgttaccaatactacctactagaattagtagcggataacggcaattattacttaacagggtagattgtaaaattaatccgaacgctgttcggacaaaaaagatcagcttcctacaaaagtattttttgtcgcggcctttttcatttaatagtttaaccgagttccatcaaccagcgcctttcagttaatcctgaatgtcaatcaatcgctgacgcgcttattcgccattttaggcgatatttgacttatgtcacacgctattgttctgttggttcttctggtacgttttgtaataacaccttgcgtggcttactaccttctgatggtccaatcacaccacggctttccatctcatcaaccaagcgtgcagcccggttatagccgactctaaaacggcgttggagcattgatacgctagcggtttgctgtttaacgaccaattcgactgcctcttggtaatattcatcttctggttcttcagttgattgcttttcctgctcagtggttggaatcatttcttcgtcgtattcagccgtttgttgtgctttaataaacgacacgatactttcgacatcctgactcgaaatgaaggcgccttgcacccgtaatggtttgctcatcccgattggcatgtaaagcatatcaccacggccaagcagtttttccgcgccactgccatctaagatggtccgtgaatcaatcccactggatacagcaaacgcgatccgcgatggaatattggccttaatcaacccagtaataacatcgacagatgggcgttgggtagcgacaatcatgtgaatccccgccgcccgagccatttgtgccaaacgaataatcgcactttcgacttcgttgctggcaaccatcatcaaatcagataattcgtccacgatgacaacgatataaggcagtggtgcacctttaatttcgccgtcttcgttgtggccttgaatatactgattatattcaatcatgttccgctgacctgtatcggcaaataattgataacgtcgttccatttcttttacaaccttgttcaaagcgttagccgcctttttggcattcgtcacgacaggaatcaatagatgtggcaccccattatagacgtttaattcgaccatcttcggatcgattaacatcaatttaacttcgtgtggtttggcactcattaaaatacttgtgataatcccgttaattgcaacggacttcccactcccggttgaaccggcgattaatagatgcggcatcttggctaaatctgacataatgaccttacccgaaatatctttacctaacggcacagcgagtggtttgcctggatgtgggggttcttgttcaatcatttctctaaaggaaacggtcgaaacggtcgtgttcggcacttcaatcccgacatacggtttacctggaattggtgcttcaatccgaatatccttcgccgctaatgcaagcgccaaatcatccgctaagttaacaattttagagaccttcaccccaactgccggttgaatctcgtacttcgttacggctggtcccagactagcactcttaaccgtcacatcaacaccaaacgaatcaaatgtttgtttcaagacctgttgatttttctcgatagctttatattccgcactctgatcagacgccggaatttgcgttaataatgctggtgttggcaattcgtaatcatcatccgtctcgttcagtggtgcgagttctgccacatctggaacatgctcatcttcgtcagccaccggttcgggtgcagttggttctgcttgcgtcgcaattggttttggtagatccttgggaccgtttattttaaaaggttccaatttttgcttcggtgcattttctggaccatccgttgcgaccatttgctctttagtctctgacgtctcttctgcttgttcagttgcattttgaacagctttttgcgtctgttcttttaaagcactgacttgcgctttacctttttcagagaccttttggaaccctgatttcgtgtagccgccaactttaaagagcccatgcacaaaccgttgtgtactctgaacaacgacgctgaatggaatatctaagaaaacaaaaacgccgataatcacaatcaagacggctattagataagtccccatctgcgcgaacaagaagtgaaaaacaccatacaacgcggcgccaattaagcccccaccaacttccgtcgtaacggccatcttctggaagtcttccaataaaagctgccatgtggcggccaagaaatggttattgaccgcttgatggtgcaagacgaatgctgacaaccaaattaaaatcccgagatacgcgattgcaaatccaagcgtcttttggtgccataaggatggctgcttgccataaatcaacaaatagacccccaaaagggcgaataaaatagcactaataatgaacgtatcgccaacaaacagacggaatacgttagcgcaaagcgcgccgataaagcccagctttaaacccgcaaataaactaattaaaataaaaataaacccgatgatgttaactgtgaaatcagtttgttgttttttctttttgcgtgctgctggttttctttttttgcttttagtggccatgaaaatctccttcaaccttaaatcctactatccattatacacgaacatctgtactactaaacccataaatgtcagtcccgtaccgtttttaatcacggtactaaaaaaggccacggcaaaattgccgcaacctttcgctgattagtcttcgttggcttgcgctgtaaattggagttgaacgccccgatttaaagcaaccgccgtcacttgatacgtcaatgtttcgatgtattcaatcaatggtcgtgaaagcttcatcatgtctttttgatcaatttcacttggttcaccaaagaaatctaagagttgaaccacttgtgaaatttgacctgacactgcaaagccactcttttctggtgcaacttggaaaggcgtcacaatttggtaaatattccccgcgctcaaatcagcttcttgtaaatatggatcttcttcgctgatggtgactaagctgacttggatattttgttgtggttctacatcaggtgaaacacggtcataatgaaaagcatcaacagtaattggatctttcttcgtttgcatcaaaaacactccctattttaatttatcattgtcgtacaaatgactcttttcgagtcctggaaaatcttgttggcgcaatgcctcaaagatcactaatgccgcacagttcgagaggtttaatgctcgaatatggtcggacattgggattcgtaaacaccgatcttcattttcacgcatgaaagtttcaggtaatccggtcgtttccttaccaaacataaaataatgatcaacacttgtatccgacacatcttgatcagaataagcttgcttagcaaatttcgtaatcaagtataaatattgacgatcgggcacagttgctaaaaaggcatccaagttcttgtgataattaatcttaacttggtcccagtaatcaagaccagcccgttttaaatgtttatcatcggtttcaaagcctaatggttcgattaaatctaaaacagtatctgttcctgcacatgtccgcgcaatattaccggtattggcaggaatcagtggttcgtataatacaatatgattagtcacggtctaaacttccttaaaaaagattcagtagattaattatacaatagaattcacaaaagctctaccttgctttgcaaataaaaaaacgtagtccctcggttattcacggcgagaaactacgttagtgtcatttcatcactagcttttatcaaaataaattctgataaaagttagggaaaaaattccttaaaaacattatagcgcccttattttagagttgcaatcagatttttaaactttctttaaattctcatcattttcccactaaaatcgtgacatctaatgaaatttcaggtagcgcttctaacgtgattgccgctaattgtgccttagaagccgtccacgtcaatggcgtcatttcgaccaaatcgcgcaatgtctcgggtgttaacgtcattgttttttgaacttgcatttcttgataatctggaaaatgttgcgcaaacaattctaagaccggaccatgatcatagctttccttagcttgaccatgatacagtaactcccgtaactcatgtaagtaacccgcattgggaatcaccttaattagttgaccgcccggtttcaagacacgtttaaattcttgatattgcgaaggcgaaaagatattgagcaccgtatctaactggtgatcagcaaatggcatccgcgctaagtctgctgcacaaaaccacgcatcggcattgtaatcacttgccaattgaatcgcaggtttagaaatatcaaacccgatataacgcgcggaaacttgcgcattgagctgttgcactggcgttccttcaccacaaccgacatcaaggactaaactatcgggggtaatccgtgatgcaatttcttttaagaacggctgaaagaaccctgcttgtaaaaaagcccggcgatgttgcaacatttccttggtatattcagacttcatttgctttgctaaaaaatataacgtgccatttttagcgaggtcaaaactatgcccattgacacaaagtaattggtgctcggctacacttgcaaatacgtcctgacagattggacattgtaatacggccaagttcgtcgttaaaaactgcttggctaactcaatttttttcaaatttctgattctccttgatttaacgtgctttcaaaagcatcctgttccggttagctacattagccaaacaatcggctacgccgcttattcgtctaattaggctaatcctcacaggataaccgcttttgacgcacttcttttcttaacgtactttcaaaccatccttttgcggttaactacgtccagcaaacgatcgacgctgtcgctcattcacgagactaggttaatcctcaaaggatacccggtttgaacgcacttcttttataccgcactttacattcttaaaatatccagtagacttaacagtaagttattgatgaaggaagtgacaccatgctcgaaacctatcgcttcgacagtgctaagaaaaagctcaccaaacatgctaaaatccagtccaacagttggattaacgtaactgatccctcgactgaagaaattgagcttctcactaagaagctccacatcccatctgattttatctactatagtttagatgctgatgaaagtgcgcgtgctgagcacgatcctgattataatgcgaccctgattattttcaacataccaattcttgaaaaagacccgcaaaaaccagataaatacctctataaaacaagtcccttaggaattattgtaacagattcgaccgtcttaaccatcaacaaaacgccagtcacctttttacagagctttgttgatggccaaattaaaggtttcaatccacaaaatcaccgtagaagtgtcctccagattctcttccgcatttcatccatctatctccaatatttgcgggacatcaaccgctctcgtgaacaaatcgaaactcgcttgcagagttccctacagaatgaagaactcttcgatctgatgaccattcaacgcggcttagtttatttcatgatgtccttaaagaccgataaaatggtactcgctagtttaatgcggaccaatatgttagatcttaatgaagatgaaattgaattgcttgatgatattcagattgaaaatcaacaagccatcgaaatggcagaaatttccaacacaattattaacgaaacagccgatacttactcgtcaattattaataataacatgaatagtgttatgaagttcttggcatcttattcaattattctcaccatccccggattagtatttagtttttacgggatgaacgtggaccttccactgtctcgctccaaaacaagttggttgattactttattcatttccctgatcatttctggtgtgctagtctatcgcttctggcgcaagcggtacattaaatagagcgtgtgccagcttctgcggattagaacccgtttaacttacaaaaggccactatcatcaaacacattctcccattctttgggttcgaatgtgttttttatttgactttcataaaaaagctcgttattatacgttatgcacggataaattccgtgttatccaaaataaatgttcgtttttaaggagaattcccaatggacgtatttgattacgaagatgttcaactgattcccaataaatgtattgtgaaaagtcggagcgagattgatactagcgtccgctttggctcagaaacgtttaaaatcccagtcgtccctgctaacatgcagacgattattgatgaaccgcttgccatctggcttgccgaaaaccattacttctacgtcatgcatcgatttcagcctgaaaagcgtcccgcattcatcaagatgatgcacgagcgcggcttatttgcctcaatcagtgtcggggttaaagacgatgaattcgactttattaatcaactcgcaaccgataacttactaccagaatacattacaatcgatatcgcccacggccactcacaagtcgtgatcgatatgattcaacatatcaaaaaagtactgcctaagagtttcgtcattgccggcaatgttggtacccctgaagccgttcgcgatttggaacgcgcaggtgcagacgcaaccaaagtcgggattggccctggtaaagtttgcatcaccaaaatcaagaccggctttgggactggtggttggcaactggcagccctcagatggtgcgcgaaagctgctaccaagccgattattgccgatgggggaattcgaaccaacggtgacatcgctaaatcaatccgttttggcgctagcatggtgatgattgggtccctctttgcaggacacgctgaatcacctggcaaattagtcgaagaagatggtcaacaattcaaagaatatttcgggtcagcttcagaattccaaaaaggcacacaccaaaacgtcgagggtaaacgcattttagtgccttataaaggtgcgattagtgacacgctcaccgaaatgcgccaagacttacaatcatcgatttcttatgctggtggtaaacgcttatcatcattgaagaaagtcgattacgttcttgttcgccattcaatttttaatggtgacatgctttaaaaagcagttaaaagagccagactaccttttaaatcggtagtttggctctttttagttaggtacctaaaaacttctctgaaatggttgaatccgacttgaaacaactgtataattacccgtgtcgcttttaaccttagcgtctacattgatcagaaaagggtgtgaaacaaatggatattaaacatacacttggagataacagtgttatctttcgtgatgcaacatacattagaagaacggtgtttgtccgagaacaaaatatgccggaaacccaggaaatcgatgcgcacgaagatcacacgattcactatgtaggttacctcaatcaagacccagcagtaaccgcacgcgtgcacgtcttaaaagacggtggatttagaattcagcgcgttgctaccatcaaagctttccgtggccaaggactcggctatcaattaatcgaagccatcattgaagacgctaaacgcaccacaacgccttatattattttattcgcacaggaccacgccattggtttctacgaaaaattaggctttattgtcacaagcgaaggcgaaatggaagcgggcatcccccaccactacatgaaattaacgctctaaaaaccaaaaaacgcacgatccgcatttattacggatcgtgcgttttttattgctcgtataagcctgaaactgacttgaaccattcaaaaaggtgactaattaatatcttgataatcgcatatactggaataccgagaatcacaccggcaaggccgaataactttcctgaagccagcaacacaatgattgtcgtgatcggatacattgccatcttgctccccaagaccaatggggaaactaaacgaccttccaaggtctgttcaacagcaaacacgatgagtactttaatcaataataacggcgagataaacgctgcaataatcactgacgggaccatcgctaggaaagagcctaaatacggaattaagtttaaaatccccgctaaaattcccaacgtcaacccgtacttcatcccaacaatccagtaacctacagtaaacatgactgcaacccaaaacgctactgtcaattggccgcggatgtactgactgacctgtgtgttaatttcttccaacactttcccagttgtggcgcgtactttaaccgggaagaattttaacaaatagcctttcattcggtgaccatcttttaacatgaagaataaaatgaacggcatcgttacaatcgcgatgactacgttcgtcaccactccgaccgctgttccaatatgactaacggtcgaagtcagcattttatttactttacttgataaattactaaacacatccgtattgatatcgtttaattgtttttgaatcgatttgaaggctgggtcgttaaaccatttcatcgtctgagtttgaatattcgcccaataagacggccactgatcaattaaactcgttgtctgggattgaatgattggaataatcgtcgcaattccccagaccagtaagccaacaattaaaataaaaataatcgtaatcgacaatacccgatttaaatgccaacgccgttcaaaccaatcaattaacgggttggtcaagtaatacaagacggccgcaataataatcggtaacccaataatcaacatcaacgactgaattggttttaacagccaagcaagttttgttaataaaagtataatcagcaacgttaataacatgtttaacaaaacaatcggtagcttcttatttaaaaaccatttaaagaaccatgaacgttctgtttgtggctgtttattctctgtcacaccaattcacctaattcctacatagtttcttgatacgttatctgcgttcctactttgaattcaggaacagccggaacacccgcggcggctggtgttaaataaagcccactttgcagttgatcttcttgtggcgcaggtccaaaaactaaagcgacatgaccaatactgttgaggttaggatttaccaacgcgcccacatacgtaatcgtataaggttgttgattaataataaccgcagaatctgtcgtcagtgttagctgttttttggccgcttcgtccataaaatgttgaatcaatgccacgttttgaatggcagttgtcgcatgttcatcgaataaaatgaccatcggttcttgatcatcaatggcgtcgttgccaattgaaatgacttctgcttgcgtgttcataatgaaatctcctcttagttaagatagtatcattgtagcatattcgcgacttagttttagcgactagtgaatccttttagtgacaaattaaaccgttttcgcaggaatatgctatactcaaagagtatttgacgaagggagtctgattatgacagaagaagttttaattggtggttatacccgccggattggtaaagggatctaccgcggaattttcgatgcaacaactgcaaccgtgagtgacatccaaccattcattaatctcgataacgcatcctatttaacgatttcaaaccgtaacatcctctacaccgtcattaaagatggggaccaaggtgggattgctgcctatgacttagctagtggcacccctgtctttttgaacgcggtcttagcagccggcgcaccaccagcatacgtggcagtcgatgaagaccgccaactcgtttatgcagccaattaccataaaggcgaaatactcgtttatcaaatccaagccgatggcagtttaaccttagcgagcacgacagttcatgaaggccacggtccgcgtcctgaacaagctagcgcccacgtacattataccgacctaacacctgaccaccgcttagtggtctgtgatttgggcaccgatgaattagtaacttatgccgtcgacaatgctggtcaattaaccaaagtagcaatttacaagagtgaacctggttttggcacacggcatttagtcttccatcccaatcacaagacagcttacctattgggtgaattgtccagtgaagtgacggtcttagattatcatgcagccgatgggacttttagcgcggttgctacctactcaatgttacctgcagattggcacgaagcaaacggcggcgctgcaatccgtgtttccaaagacggtcgtttcctttatgcttccaaccgtgggtataattcaatcgttgtgtatgccatcagtgatgacagtcgccaactacgagcaatccaacaaatgtcaacggatggtgaattcccccgtgacttcaatctttccgctaacgacgattttctattagccgttaaccaaaatagtgataatggtacgctttatcggcgcgatgcccaaactggtttattagccgcctgtcaaaaaaacttagaaacacctgaaggcgtctgtgtcttattccattaaaataaaaaagattgaccgtattggtcaatcttttttatttacttcttttacgatccattaaattaataataattgcaatggcaattaacacaattgacgcaaaataaatgaagtgtaaaccattgtatagaatatggcgtaatgttggtaataattgtttaggtaagttcaaagcagtttctggattaatcaattcatttaacatgttttgatctaatcgaccatcaccagcaatcccttttgccaattgccgattcaaaataatcccataaactgaaaccatcaaggtttgacctaaagttcgacttaacgtattaaacgacgttgcaacaccaactttgtcagcaccagcaacgctttgtgccgtaacagtcgtcgtggtaatgattaagccaaagccaatccctaaaccagcagcaactaataagaagaaccaaaacggtgtggtttgtgggaccaatgctaagatgaagctcccaacaagtaaaatacacaaactaccggctagaattgttcgtggtgcgtgcttaacaagtaataggcctgcccataatgaggcaaaaatccacatcacagaactaggcgtcacaacaaagccccccatcgaggctttcaatccgaggatcccttgcatccacattggcatatagacttcaaaaccaattaagaaaccactcactaaagcagccactgcattttggacaacaaatgttcgatttttaaataatgataatgagataatcggatcttgtgcatgtttttcaacgcggataaagaggtaaaaagcaaccactgcaatcacgagcattgaccctaaaacgagcactgacggtttggcttcacccatgacttggaagccatatagtaaactcaaaagggccgccatcaaccataaactgccccaatagtcgactggttcagcactcgtcttcttctcttcttgaaggaagtaccagattaaaccaatcgtaataatcccaatcggtacattgatgaagaaaatccaatgccaggtcaacttatcaacaatgaagccccctaaaagcggcgcaatgatggaggcaatcccccatgctgacccattaaaacccaagactttcgcccgtttttcaatcggataaatatcagcaataatcgtaaatgataccggcataatcgccccggctcccaagccctgaattgcccgggaaataattaacgtccccatatgatttgacaatccacataaggatgatccgatgacaaacaaggccaaaccaaagatgaagattggtttacgcccaatccgatctgccatcttaccatagattggcgtcatcatcgcattcgttaataggtagattgaaaagacccagttcatcaatttcataccgtgtaaattactaatgatggttggcattgccgttgaaacaatcgtcccttcaatggctgtcatgaaagttgcgacgaaaatcgcaatcgtcacgagtaatacattcgtttttcttcccttactttgttccattcttagctccctctcttattcttgggcataaaaagagccttttcttaactcaaataagctaaggaaaggccgcctcttttactcgtctaataatacattaggcatttagtttagcaatacttgcctttaaggcatccactttatctaaacgttcccatggaaattcgacatctgtacgcccaaagtgcccatatgcagctgtttgcttgtatataggtctttgtagatctaacatttgaataatccctgctggtcgtaaatcaaagttttcacgaattgcagtttgaatcttttcttcactgacggtccctgtttcgaaagtatttattgaaacagaaacgggttgcgctacaccaattgcataggccaattgcacttcacacttgcgcgctaacccagccgctacaatgtttttagcaatgtaacgggctgcataacttgctgaacggtcaaccttagtagcatctttccctgagaaagcaccgccaccatgacgtgcataaccgccgtaagtatcaacaatgatcttacgaccagttaaacctgaatcgccttgtggtccaccgatgacaaaccgaccagttggattaatgaaatacttggtttgatcatccaagtatttggctggaataacggtttgaatcgcttgttcaagcatatccttttgaatggtttctaaagtcacatctgcatcgtgttgggtactgataacgacggtatcgacacgaacaggttgttcgttttcgtcgtattcaacagtgacttgcgccttagcatctggtcttagataagcgagttgcccgctctttcttaactcagcgactttgcgcattaaacggtgtgaaagggcaattggtaacggcattagttctggtgtctgatcgacagcaaacccaaacattaacccttgatcccccgcaccaatcttatcaagtggatcttcatcctttgcacgagattcaactgaatcgtcgaccccttgtgcaatatcaggtgattgttcatcaagtgcaacaatcacagcacagttatcgccatcaaagccataatgcccatcacgataaccaatccctttaatagtctctctgaccactttttggatatcaacgtatgccgttgttgaaatttcgccgacaactaggactaacccagttgtaacggttgtttcacaagcaactcgtgcttgtggatcttgtgctaacatcgcatctaagatggcatcactaatttgatccgcaatcttatctggatggccttcagaaacggattccgaagtaaataaatgtctttcttgcatttctatgtttccccctatatatgtgtcggttacaaggcctcttcacggtgtgtgaatcctatcgggaacttcttataactctactatcctagcacaaaatacaatccatttcaaaagccgttgaccttcttttcaaaaaaagttaagatgagacacatattctaagaaagaagtgttgctattgttctaccttaaccaacaacatctaaaggcttcaactcggccacaattactgactttgtttaattatttaaatctcagtttaatcgtcggactgacaatgtggtcttttccaaagcaattcgggctttcattttatctaactgcgattctaggggcgctattagccattttactcgtcttatcaccccggtataaaccaaagcgaataattgcaactgctgcccttttagtcgcaattattctagccgcaatcatcggctggcgtgatctacctttgattgggcttctatcagggattactagcatttttgttctaatcccttttatctacccagaccagttcaaagaccgtacgttacggttatcatttcaattcttactagccccatttttctttttaattactcagattttcagtggcattcactttatccccgaggatttactcgtaaaattaggcctattcttaatcatcatttatcttctcgaactaacgactcacaatcggatgattactatcctcagttatgtagtatgggcgtgcattattattgcagtgattttaacgcatttaattcacggttggcatttaattctctttgcaggtggccagttattattaattgcgttacaactcggcctaatcaaacgtaactgctatttacaagagtttggatacttgctattaatcactggcgtctttaattaaaatgattaaacaacaaaaaagcgtaagcaatttactgcttacgctttttttaagacggtcacaacgggactcgaacccgtgatctcctgcgtgacaggcaggcgtcctaaccagctagaccatgcgaccgaatggaggttacagggctcgaacctgtgaccctctgcttgtaaggcagacgctctcccaactgagctaaacctccaaaaaaatgacccgtacgggatttgaacccatgataccgccgtgaaagggcggtgtcttaaccacttgaccaacgggccatgtcatttattatttaacggagagtgagggattcgaaccctcgaaacaggttagacccatttacatgatttccaatcatgctccttcggccgctcggacaactctccaaataatatgagcaatgaattagtcaaatatgaccctgaattaaatacaatccccttgcgaaggtttactcctgtagaaatgaacttgttcttttctatagtttctagaatgcgtgataaaggtgatgatactgttagatttacctttgatcagttaaaagagttaagtgcctataagccaaccgcaaataatcggtttattgatgacatacaaagtacatatcaaaaaatactaggtcttagatttggctctcgaagtaaagatggtcttgatagagagatgtttgtcatgttcactcgatttgaaattaagggatctgcagacgttccttatgttgatattcaaatttatcccaaagcgttgaaacttctaaataatctcgaaagttgggttcgttatgctttgacagagttccgagatttaaagagtagttacgcaaaaacaacttttcgtattcttaaacaattccgaaccactggttatgcttatttttctaaaaatgatttctttgaactactagatattccgcaaagctattggagtaagcctgcgaacgttgaatctagggttattcgcccaattaaggaagaactaacccctttgtttagaggcctaactatacgaaaaaaatatggtaaaggtcgtgggaaaccagtgattggttatacttttacttggaagcctgaaagaaaagacgcaaacgacttttctcaaggtaagtttcaagatgagcgtcaaaaactttttaatatccagaataatggtgaattaacagaacaagaaaaatggcgtgctaccgataaagttaaaggcctaccactaggctcaactgaaaaacagattttagccgaacgacagattgagcatgataaaacaataagagatcagacaagacaagaaatgcttgctgaactccgaaaggggtttggaaatcatgcctaaaactattagagaacttgctgatgaatttgatgtatcaaaacaggccattaggaaaaagctcgatgcaaactttagagcaaactatgtacaaactgtgactaggaacggagtacaaacgttagttattaccaattcaggttatttgctgctaaaacaacatttcattggtggtaacaaccagaaaccaggagaagaaacatttactagtaacactggtaacaagaatacagatacagtagagttactcaaccaacaattagaaatcaaagataaccaaattaaagaaaaagatgaacaattaaaatcaatgcaaaaattattggatcaatcacaacaattgcaattaatgactgcaaagaaaattgaagattttaaaactattacttctacacaatttggacatgacaattctgatttgaatattgataacgatttaaaacaaaaaaataatgcgtggtggcatttttggtaaaatcttaaattgtgtaattgaaacttaaatataaaactaggagaaattaatatggataataactctaataatattactttacatatccttccagatactggtgccatgtgggaaggattaggcggaaattttgataattttacggaaattttgaacgaatttattgataatgctatttctaatttactaaatgtggagaatcctattaaaaatattttagtttctgttgaacaattagttgattgtccaacagaatataggataactatagaagatacaggatcaggaattcaaaatcttgagtcagctttcactattggtaataaaagtggacaagaatctccacttaatgaacatggttatggtatgaagcacgccttggcagccgcaaataaagctaatgattcttgggaaatatattctaaaaaggaagaagatagcttttattcacttgttgctgctccatattctttaaagaatcaacaagttaaaagaattagcaaaaatttacctggacaaatatgtagtacgcatggcacgataataagttttaatatatcttttgaatggctaaaaactattactaagggattgagaggcaattataccaagttatctaaattcatgaatattttacaagaagatttagggtacacctatggtccatttttttcagaaagtggaataactttaacattaagatataaggacattgaatctaatagaactcaaacccttaacgtagaggaagttaaaccttcagaagttagaactttaaacccaggttccggcacaactacttatgatttaagtagggggcctatatccattgattataggtttcttcaaataaaaaaatctgaaaaatatgaaaaacattatttagcgaatatgagtacttctggtgttgaaatacgtatcaacggacgtttgctagctgacaatattttctcagatatttggggaattgatagacacaattcatataattatctattgattaaaataaatttaaaatcgaatgacttgaaaagattacccaaaaccactactaataagacatcattaaagcaagatgacccatgcttggataaattatattcttggattcgatcaaaaatgcctactcccaaaaaagaggtttcacttgcagatgatgaaatagacctcttttccgaattagaaaaacaaaaaaagtcgtcttataaaacaatagatccatcggccttaattacaaccgaacaaaatacattttactcattaggagaaaaaatacgtatagatttgtatcaatcggtattaaataagattgtaatcccttcttttttcatggatgagtttagtgtacaggttagagggggggggaagtcaagagagcagagcgatgcaaaactcggttaggtcccagaatgtaaggcagcgaagccgtgaattcccaatcctggaatttgcggcttcgctgccttacatggccgggacctgagttttgcatcgcgtttaggctagataacagtctcgaagtttattaaaaaatttaattgatttcaagtcaagaaacccagttcaatccttatcaatatagccgacaaattagcaccaaatccagattaaaattcaaccaaaaatcgataaatataagtcgcttaaacgctgttaaatcagcctttaaccccaatcaaaatggcataatcgaatttattgactcacgggtcattgacttattggtcaacgagctttatactatcggtgaaatcaaaatacaacctggttgagcgacccaactgccgctccccataggagggattcacaatgacacaaacggtattaagtattcagcatttacaaaaacactttggtaagtttcaggcgttatccgacattacgttcgacgtgaacgcgggggaagttttcgggtttatcgggccaaacggcgcgggtaaatcgacgacgatccgggtgctgttgggaatcttgaaggcgagcggtggccaagcgacaatttttaatcaagacgtgtggtcgcaggccgtatcgatccataaccgaatcgcctacgtgcccggtgacgtttatttgtggccgaacctgactggtggtgaaatgatcgatttcttgttgaagttaaatcatcaaaagcacactgcgaagacggatgcgttgatcaaggagttcgaactggatcccaagaagaagtcgcggacctattcgaaggggaaccggcaaaaagtcgccttgatcgcggcattttcaaccgaagcggatttttacatctttgacgaaccaacgagtgggttggatccgttgatggaagagattttccagaagcatgtgttggcgctgaaagaagccggcaagagcgtgctactatctagccatatcctgtctgaagtggaacggatgtgtgaccgaatcggcatcattaaagccggtgagattgttgaaaccgggacgctggacgaaatgcgtcagttgactcggacgcaaatcacggtcgctacccagcaaccactcgacgcagtggcccagttagcaggcgttcacgactttacgccagacgccacaacggccaacaaggcgacctttgcggtggatacggctcaggtgggtgccgtgatgagtcagttggcagattaccaaatcgtgaccctgcaaagtacgccaccaacactcgaagacctgtttatgcgttactacaacgctgagggggagggcgattctcatgaagcgtaaccaagaaaccgcgcaaaccggttacctgacgcggatgtatttgcgtcgggaccgaattgccatcttaatttggttgttagggatcgttggcggggccgcttccggtgccagcaaaatcatcggtctgactggcaatgacaaagcggtcgcatcactgattcatacgatggacacgcctgcgatggcggcgatgtttgggccgttcaaggccacccagtctgccagcacagcgtcaattttctcagccacgatgatggtgtttatggggctgattatggccgttatgaacatctacttcgccatccgtaacacccgaacccaagaggacaacggcgtgttagaaatggtgcgggcgcacagtgttggtcgtcagagttcgctgttagctacgctgtatgagctaatcatcatcaacttgctaaacggcgtcctcatgagcgttacattgcaagcgatgaacatggacggggccgatgcgactggtaactggctgtttggcatgggcctagccgcttgcggcctgatgtttggcgccttcacgctactgatcgcccaactcgccagcaacgcccgtggtgctacaacaatgagttacagcttacttggtatcctgtacattctaagagcgttaaccgatgtgcaaaataccgactacacttggtggaccgtattcggctgggttgaaaaactcggcgtttacggtaaaaataactggttgccggcactgtacatgattgcccttgcagccgttgtcttagtcatcaccttcgtggtcagcgcgcaacgggacttaggcagtggcctgttaccagaccggcccggtcgtgctcacgctagcgcctttttagccggcccgactagcttaattttccggttggaacgcacgagtttgattgcgtgggttattggcctgttcatttacggtgccagcatggggtcattatttgatacaattggtgatatgatgaatagtagtccaatggtcgttaagattatcggtcccgcggcagctcaggctgctggccggacgatgaccttggaatttgcatcaatgatggcaacggtgatggcgattggggcgagtgtcccggtgattgccacgttacttcggttaaatagtgacgagcaaaagggctggttggaatcgatgcacgctcggccagtatcgcggttccagttatttggggcttacagtttagtggcaacggtcattggtttgttgacattgtttgctggcaatattgggatggcaattggcagtcagggcatgaagcacgcctttagtgtcgggcggttgatgcgcgccttttggggctttgcgccagtcattttaatgacggtcgggattgcggcagttgttgttggtttgctgcctcgtttgcagaagttggcgtggattctcccgatttacgcgttgttatccatttacttgggcggtctcttggacttcccagaatggacgaagaaagtaaccccgtttggctggatccgcaaagtaccgctacacacggtacagtgggatcaagtgggcttgctggtcgtagtcagctgtgtgctggtcttgattggttacagcctgtaccgtcggcgggatttgattgaaaactaacccaatttaagaaaggacgttgtgatgttagccctaaacccagaagtacccaaggatccagaaaaagttgaccggatcatgaaaagcgctacccatatctttgcagaaaacggctaccttcaggcgaaaacggccgacattgcgaaagcagcgtccgtgtcgaagggcatcgtgtttcggtattttggtgacaaaggccacctgtatttggccacggtagaatacgtgattgagcacttgacatcgattgcggacttcagtgtgtggcgtgacgccaatgacttaggcgatatgatcgaacgggcggttcgctataaaatcgaattacagttacagtatccagacgagtttacgctttcggtgcgctcgtttggtgaactgggcagcttgccggaagagattcagggcgagattgccgaattgtggcgcaatcaaaccacgatgggcatgctggaactagagcaacccgtcattgaccgaatgccgattcgagatgatgtggatcgtggtacgctgcaatgcttattatcagcggtagcggaccaggtcttcggcgatgcgcagcagtttatgcagcagcacccgaaggctaaaattgaggattttgaacccattattcggcaaattcaggatgagtatcggatattggagcatggattcttgaagtagcgtgacaagttattaaaaagcgaaataaagcgtctcagggatatcattcagagttttaatcctgaattattcaccagaaactccaaaatccccatcaaacacatgattcaagtgcttgatggggattttacgttttcaccttttaagtgcagaaaaagagcctcagctctggtatagttaactcgaccaaaagacactataaagagaagaggactctataatgaaaactgtacaggaaatggcatttagtttcaataaaaacattctagcatcgcataccggcggtcaattatcttctgatggtggcctaaccttgtgtgttgaactgatggcaaagtttcagttcacgaacttagctgacaatctattgaagttcaacgaccatcgacaatactgccgacatagtaattcaagtatcttgatgcagttggttctgcagatcattgccggttataatacagattctgctgcaacctcattggttgcagaaccattgtttaaacttttattggacaaaccagccttagcttcacaagcgacgatatcccgtttctggcaacgtatcgattccgcaggtgtggacgccttccagactttaaatcaagctcttattgatcaagctcgactgctaactaatcagacgaccaccattattgatattgattcaacccattctgacacttatggcaatcaagaagctactgactataacgcccattatggctcggaggggtatcatccattactagctatcgataatgatggtaatctcctgaaagccatcctacggcctggtaatgcctataccagtacagatataaaagcctttttagaaccgttattaaaacattatcaagaccaattgccagaaactgatattctggttcgcggtgatagcgggttcgccacaccagctgtttatgatacctgcgaggccgatgatgtcttttacattattcgcctcaaacgtaataagcgactacacaacttggcagaagagtttgtacagataagcgacacaactgagtggcatgaaaccgaaactcactattactcagcaacttatcaggccacttcgtggcctaaaccgcgtcaagtatacgttaagtcaactcgtgtagctggcgaattgatcttttcacatgaatttattgtgactaatctgacaaatttaaccgcagaagcagcatttgaactgtatcataagcgtggtcagatggagaattatatcaaggaagccaaagagggcttcttctttgataagactgatagttcaacgtttaccgccaacgctgcccgtatgatggttagtgtattagcgtacaatattatcaattttatgaagcaaatagccctacctaaaacagagaccggattgcgtgttagtacattacgaatccgtttattcaaagtcgctgcccgcgttgtgtttacctgtcgacgaatccagttacgactgagttctcatcacgtttatcatcgactcttttatcaggtattacagcgtattcaggctattaaatagccccaattaaaaaaaattctgtacgatcaagggacaagtgcacccaaaaattcaaaaatgactcaccgttaggtgataccatcaaaatttagagtctcaatacatagtaagcaagatcaaaagccgtcagtttttgaaaaacatgaaaactgacgacttttttggaaggtatgaataattcaggtaatctacgaaggaaaaaaagaagaaacccacccaaaagatgtctatcagctactaatgtattgggacggtctagtttacgatggggttcctgttgctgaggggattttaattgccgctaaacatccagaaagtgttagaaaaattgttactctaaagaacaattctaaagatgataacggaaatatgtataaaataactttagaaacatggaaagatgaaaatattgattatcctgaatagtatgttccactaatggagttaagctataaaaaatggtgaatttattccactggaaaatttggcactgtttttctgcgttgctttggacaagtaacttaagaattttatttttctaattctaaatatatttggcatcctaaatactatcgctttgtttcaagtaagcctttttaaaatgacaattggtattaaagataaaaaactaatgccaaataggaacctggggttaggcctaggtggaatattaatcgtaataggaatgctatttcttttattagccaaccatgttttgattagtggtattttatctggaaaggattcgctattctcgtattctatttattttcgaaattaaattctaaactttcatgaaatgttaattcgtactgagctttaggggctataactatcaaatcgcccctgtgaaaacttattaaaacagcccccattatctaccggttagataatgggggctgtttttttgttaggtgatataatagtacttaaaaaacgaggtcgatgatcacatgcccaatcacatatttatcaatcgagagtccgggaatgataatatttcaatattctatgacgaaccatcatttgtggtcattgcgaataaagatgatctaactagcattcagttgattgatgagtctaaaaaacctggtatctatatattgttaggtgatgataaacgatatataggtcaagcatcaaatgctatttttaatcggttgcagcaacattatattaataagccttggtggaataaattaatattttttggccgtgaagatggccatttatcaaaagcgcagttagatctgctagaacgcaaaataattgaaaaaatgaaacgagcagaaatcgaactagataataatacccaaggtaatcagagctatattgataaattaagccaattttctgccttatcattgttatcgaaagttgaacgggtattgatagatatcgcaaatattaacttatttgctagtgatgataccgaatttgatagggtggaccctactccaaacaacgatactatttcgattttatttggtagacagcattatacaggaagctctcaccgagacgtctttattaaattaatatctacacttgttctgtcgtcagatatagctaaattaacggatttaataaattcgactgaacccaatactgtacaaataataggaaccctagagcgcgtctcaggacaaggtacaaaattaactaaagctatagattccagtaaatatcatgtctatgttaatttttcgaaagatgcgttgtataaaaagatacaaatattagctaatttaacaaacaataaagtaacctttgaaaggtggtaaattcactatggtgcaacaaatagtcctcccaatcaaagactctaacgtcttaaaaatggtgcaagacaccttactcgatagttttcgggcaggtcgacgtaactacaccatctttcaagttggcaaagccaccctgctgcgggtgagtgatgtgatgacgttaaagaaatccgatgtctataatccagatggctctgttaaacacacggcctttattcatgataaaaagaccggtaaagcaaatacactatatttaaagcccgtgcaacaagacttgctgaaatatcatgattggctggtccaagaaaacatcaattcggattggttatttccttcaacggcccattcagaccgtcatatcaatgagaaacaattttataaggtgatggcacgagttggtgatctattaggcattaattatctagggacccatacgatgcgcaaaaccggtgcttatcgcgtctacacgcaatcaaattataatattggcttagtcatgaatctgctcaatcattccagtgaggcgatgactttagcttatttaggcttagaccaggctagtaccgaaacgatgctagatcaaattgattttggttaggaggctggttttatggatttagattttgaaaccaacaagtatgatctttttgatgattggcatcaaaacaagactaaacaagactttacacaaaagttgcaacaacaagctcaaattgaaaaaacacacctgccaaaattattgtcgcgtgaagatttaaaaattcgttggcagatgaactctcgtcaaagtgttcatcaagttgctagtaagcctgattttccacaacccgtttttgcttttaatcatggcaagaccccactttacttagcaactgaaattcaaatttttgaaattaatcacccctgggtgataactcccagtgctcgtcttacttatagtcattggatccttcgtaatgtgattgatcaatcttgatattcagctctaggtttttgagggtttactctaggttttttatagttggcgctagccttctaatacaaataatacccatttcgatgggtattaaatctacccttgacaagtgtcaagggtgtaagtgcgcattgaccttgtttcactcggtctgctgatagctatgaaatcaggttttccgttattgaattaaatacatttttaattcaatatatgcgtccaaatcaactaaatttgctatgctttaaatacttaaaaactattacagattccgctattttcaattcgaattttttaattgtcttttacagagattctttataaacttagcaacaaaatttgaataactaactgtaagagctgcgtatctaaactgaagtcattattttaatgttaggagtaattaagatggacgaaaaaaaagtactaaaaccaattgatgaaatgcttgctgatccttggcaagttgatattcaagaattgtttgaagcttctgtcaatgaacctgacgagatcaaaaggaatttgtatgattccttatacacttatattttgcaaaaaaagacaagaagatattattaatcgcccaggctttgtaatttagccctctaaaaagtcgctgagggctttttattttgactttggtataaatgtatataagtagccttaaaatcgctgagaacaaaaaataaggcccttaaaaagggacatagcagttaaatctttatcaagttttagaaaagctaactatttgctgtcaatggtagcggacgagcaaagcgtaggagcataaggaattgacagctctaaaccagtcttaacactgaattggcgaaagccaaagtttctataaaactttgctttcctgcctaacggcgagtgaaaaagcggtcaagctggctcagcttggacggggttcggggcgtcagcgcccgaattaatgtggcttgccacaccttttaagcaacgaacagcgtgaggcgcaaggagctgtgcgactggagtttaatgtgagccgttttttggctcactcctttgtgtttttttattttaggtttgtatctcgtacagtggtgcctcttatatacctcttttataaacctcttttaaacctcttttagacccctcttgagccttactcccccaaggcgtacagaagtttatcgactacattttgtctgtttatcgactacattttgtctgtttatcgactacattttgtctgtttatcgactacattttgtctgtttatcgactacatttatttactcctgtattcaaataaggtagtattattcaaggaggttattttaataacccgggtcaattgacccgggttatttttttgatcaacttacgctaaattaattgacaccctttatgaatggtatggtaccataggcgtaattagaaaagcgaagggattcgggcgcatgcgacgttctaaatggataataatcatcattggtttaggagttttaattggcagtggatggtggcttttagggcatgcaacgacgcaaaaagcgcagcaagtcaagcaaacagaaaatgaacagcccactttttatttgcatggttatggcggttcggctcgttcgactgatagcatgatcaaagctgctcgcgaacaaaagaatgcgacacaggtcctcactgcaaccgttcgtaaggatggttcagttgatttacaggggcgttggttagctaaaacgacacgaccaatcgtgcaagttgttttcgaagataatcgcaatcctaactatcaacaagatggtgagtggtttaaaaacgtcttagtcgcggttaatcggcagcacagcttcaaacgattcaacgtggtggctcattcgatgggcaacttgacggccgtttattatttattgaaccatgcgattgataaacagttaccccgtatggcgaagatggtgaatattgcgggtcattttgatgggattatcgggatggatgatcagcctaatcaaaaccaggttaaaaaggatggccaaccacaaaaaatgaacgcgacttatcggcaactgatgggactgcgtaaccagctccctactaaatcgattacggtgttgaatatctatggggatttaggcgatgggacgcattctgacggacgtgttagtaatgcatcgtcacagtcgttgcggtatttggtgacgcctggtgcgaagacctatcaagaaaagaagtttactggtaaaaaagcgcagcatagtcaattacacgaaaatcatgcagtcaatcaaactgtcttagcgtttttatggtaaaacatacttaaaaagtggtggcgacaaaaattaattttgtcgccaccacttttttaatgttcaagacggtagtctcgcgctgcttgttcgagattcgaaatgagagcttgttgttttggtgagaagaactgggtcttacgataggctaacgagatgtaaaagattggttgtggttcatccaataaatcaagtaccactaagtcatcagcaggcgtaatactggtttcagttagaaaaccgatgccgacattttcgtgaaccatactttttaagacactaacgtcattggtgcggtaaataatttcgggtttgatttgattgacgtccgataagttcttgaagaccacgggatgcacgaatccttccgcgagcataataaatttctcgtgggctaaatcacgaaaggtgaccgctggtttctgggctaagggactatcaggtgcaactacaatcttaaaatggtgacgttcgatgactttagctgtgatggtatcggtttgaagtggcgtcgcagagccaagaagcgcgacatctagttcaccggcttctaatgaagccaacaattctttggaacccccatcagctgtcttaaaatgttgaatcgtgccgttagcggctagcttttgtgctaattttgagaagtagtaagtgccgataattggtggcaagccaaaacgcaaatcagtagcgttgagattgagcatgtcggcctttgttagttcaatctccgctaatattcgcgcggcatgttgataaagttgctcaccactaggggtaataatcaatgattggtgtgattgatcgcgctgaatgagtttggtcgcgaattcatcttcaaggcgtttgaccgcgtaagtgatcgtcggttgactgaccttgaattgatcagcgactgccgtaaaattttttaatttaattagcgcagcaaaataggccaaatctttaatcttcataaaaactcctgtttaatgcagtttagacgtttcatataaatctattttatcataaatgtaagttttgactatcaaatgttgaggcgtgtatagtgaccaacatgatataaaagaaaaggagatttttaatatgaaagcacaacaaattttaaatgatccatttttaaataagggtacagcattcactgctgaagaacgtgcacaatttggtttaacggggatgttaccacctcacgtgcaaaccattgatgaacaagttaaacaagcttatgcccaatatcaatcaaaagccaacatgcttgaacaacggattttcttaatgtcaatttttaatgaaaaccgtgtgttgttctttaaattattcagccaacatgttgctgaattcatgccagtggtttacgatccaacgatcgctgacacaatcgaaaactacagtgctttatatgtgaacccccaaaacgctgctttcttatcaatcgacgatcctgattcaatgaagacaaccttggcaaacgctgctgatggtcgcgaaattaaattaatcgttgtgactgatggcgaaggaatcttagggattggcgactggggcacacaaggtgtggatatctcagttggtaaattaatggtttatacggctgctgccgggattgatcctagtcaagtcttaccagttgttttagatgctgggacgaaccgtgaaagcttactcaatgatgagttatacttaggcaaccgtcatgaacgggttcgcggcgatcgttactacgatttcgtcgatcaattcgtgcaaacagctgaagacctattccctaatatgtatcttcactttgaagattttggccggagcaatgctgctaatattttgaacaagtacaaagatcaaatcgtgacgttcaatgatgatatccaaggcacagggattatcacattagctgggattatgggcgctttaaatatctctggtggcaagatgaccgaccaagtttacatgagctttggtgctgggactgcgggtgctgggattacccatcgcatcttcgaagaaatgttacaagaaggtttaactgaagaacaagcacgtagccgtttctacatggttgacaagcaagggctattgtttgatgatgatccagaattaacaccagaacaaaaaccatttgcgcgcaaacggagtgaattcgcgaatgctgatgaattaacaactttagaagctgctgtcaaagcaatccacccaactattttagtggggacttcaacccaacctgggacctttacagaatcaatcgtgaaggaaatggctgctcacacagaacgcccaattattttcccattgtcaaacccaacgaaattagctgaagcaactgctgcagacttaatcaagtggactgacggcaaagctttagtagcgactgggattcctgctgcacctgttgaatacaacggtgtcacatatgaaatcggtcaagcaaacaacgctttagtctatccagggcttggtttaggcacaatcgcgtcaactgcgaaagtcttaaatgacgaaatgattagcaaagcagctcactcattgggtggcattgttgatccaacagaacctggcgcagctgtcttaccgcctgtgacaaaactagatatcttctcacaaacggttgcgaacgctgttgctcaaagcgctgttgatcaaggtttgaataaagaaccaattgctgacgtgcaaaaagccgtcgcagacatgaaatgggaaccagaatacaaagcactataatttaaatataaatcggtaggagcgtgaaagagttggcagcatttctaacatcattatcaagcgttgtcgaaatcgtcttagtcattgcattggggttttggctacggagttcaaaaaaattcgatgataattttaaaggcacaatttcatttttaatcatgaatgtcgctttaccattatcaattttcgtctcagtattagataacttaacccgtgaaaagttggtcggtttatctggcggcttgatctacgtcttaattagtttcgccctcggttatctcgtggcatggttactaaccaaggctttccggattcggccaggtcgtcgagggacatttatcaatatgttcgtcaatgctaataccatcttcattgggttaccattgaacttggcactattcggtgacaagagtttaccttacttcttgatctactatgtggccaatacggtttcaacatgggcaatcggggtcttcttcatctcaaatgatgatccaaccaaagaaaaaggcgctgctaaaggcaaatttaactggcgtaaattattaccttcaccattaatcggtttcttagccgcattaatttatcttttaactggtttaccattaccagaacttgttgataagacattctcaatggtcggtggcatcgtaacaccaatgtcattgatctacattgggattatcttagctgatgctggtttgaaatcaatccatttcgaccgcgatacagtccttgcgttattaggccgtttcgttgtggcaccagccatcatgattgccatcatgctattcttcaagaacacaacttcaattccatcaatcgaacaaagcacattgattattcaagctgcaacacctggtttggctgtcttaccaatcttagttggtcaatcacatggtgacgttgaatatgcaacgaacgttgtcacaacaagtaccgtcttattcgtggtcgttgtcccaatcttgatgcaaattgttcaatatatctaaagcttaaatgtgtcgttcagctgacactcccctaaatcttacccccagcgcgccgtctcaattaattgagacggcgctttttttgtgcaaagaaacacaaagaatgttgtcaaaggcggtaaagtgcattacaatgaaaacggatttaataatgtgaaggggacgatagcatgacagagaaaatctacactaacttagcacctgaaccattgggaccatacagccaagcgattgcaacggatcaactggtctttatgtcagggcaactcggattaaaagatggccaattggcaccggacttagcgagtcaaacaaaacaagcaatcacgaatatgcaacacgtgttagcggcagcaggattatccctagaaaacgttgtgaaaaccaattgttttttaactgatttggatgactttaacgaattcaatgaagtatatgcgcgattcttcggtgatatcgcaccggctagaagtgccgttcaagttggtaaactaccagctggcgcaattgttgagatagaagcagttgcaattcgttaatgccgtaattgactgaataaacaaccatttgaaaaaagcctccagaggaaattaaatgcatttcatttaatcatctctgggggcttttttgcatgcctgaaatttaatgtttaaagggatgttcatgggtacaaatactgatatataggcattgttgtgaaaatattctaccaatgttaattataaaaagattaaaattagatgatgaaaattgcggataaaatgaagctccagcgcgaccattttgatgacatggaaccgaatacaaatatcggcattaaagaagtttacacatgttgcataatcatagatagggattatctctttaaaagatttaacagattcgttttaaaacaacttgtacacaatttaatagcttatcagaatgaaaaaacattaagtccaattggtgattaattgattgaatctttgatatcccaattgataactagaccgtaccaaaggtgtagtgatgaatggaaaaatagaaaaatcatatggaggtagacgatggatagaagaaaattagcgctgggtgcaacaatgctgaccatgttattgacgtttatctgtatcaatagtggtcgtactcaagcagcgatacccgcccatattccaatcgatggcatctttaaaccctccattggggtagatagttccgttcaagcaggtggaattgtgcaagtgacaccagatagccagaacaagaagggggcaatttggtcggaagagcagtataagattgatttgacacataattttacaagtttaatgtatgtcaatttaggggacaaaaaagcgcaatcggttgacgggatggcctttgcaatgatgaatgacccagacaaggttaagaattggcagcaagtgaccggtggcgcccttggtgtttggcggaatccattttcttgggtaaaagataactcagcaatcgccaagtcatttgccgttgaattcgatacgtaccataatggcaatgattttgacggtttgctacccaatgatggcccagatagaggccatgttgcttataattttccaggacaagatagtgcatatcagcgtttaccaagtcgcttgtacgcgctaaaccatctacaacttcaaaaaccgcaaaatggtgattatttatcattagtaacattaggccatatcgtgatggcaccaagtgtacaggctgcgacaacatcgaatgaaacaactacgaggaaaattgcactagaagcaggggacacaacaacgactaacccaccaattgtgccagggacagatggaaacggaaacggaccaactggcgcaacaggggatatcacgattgataatttaacaccacttgattttggtaaggtgaaactgactggtggcgcgcaaaacgttaagaatatcgttaaagatcctaacgtacaagtcaccgataaacggggaactggcgctggctggaatattaccgttaaaagttcagaatttaaagacacaacggattcaacgcatatcttaaaaggcgcacagattaattttccagtcggtaaagtagtcgctagtgattcaacgaatactgctgcaccaacagctaaagcgattactgttcctgctgatgggttggataatgcgcaaatcttgatgagtgctgataaagataaagggatgggaacatgggcagatgtgatgacaactgacggcattacactggatatcgctggtggcgcttatgctggcagctataatgctgatttgacctggacacttggggatacaccgcttcaattagctggcagcagccgctaaatttgaaagaggcaagtgttaagtcgttactgcaacggactaaattttaatcgatgtgcaaagtgattaaagagagggacttcaaaaatgaaatggatgcatattttacaaagaatcagcgtcgtcatcttaatgggcggcatcgcgttgtggttgaatacaacgaccgtccaagcggctgatcagagtatgaattaccaagttaaagcgaatttacccagcagtcaaaacaatcaaagtgtaacgtattttgatttaaggctggcacctaatcaggaagagacgattagtatcacggtgcaaaataaggataaccaagcgcatatctttaacatcagtccgaatacggcggtgactaatcaaaacggggtcgttgattatagccagtcaaagaaaaaagcggatgaaacggcgcctgctaatattgcctcactgattacgggggataaaaaagtaacggtgccggctcacagtagcaaggacgccattttcaaaattaaaatgcctgctaagaagttccattgtactttattaggtggttttaatattgttcgtgaagggcagcctaccgttaaaaagcaaaagaatcgcgtgacattgcgtaaccaattcgcttatgtaatcggtctgaaagtgaccgaaagtgatgccattattgcgccaaatctgaaactgaatcacatcaaagcggggctcgttaactatcggacagcaattacggctaatttacagaatacaaaggctgttatgatcagaggcttgaaagttgatgcggtggttaccaagttaggctctgatcaagtgcttcaccggacagtcaaatcagacattgcgatggcaccgaattcgaactttgagtacgccatcaactgggataatgaagcgctgaagccgggcaaataaatgcttaagctaaccgccactgataagtcgggcggttagtggtattttacgagtcggtttaatattacagagcaaaaagcccatcaagctaatgaccaagccgttgatttacaaaaaacaaccattaactggtggtatatcatgcggtggcatattcctggtgctcttagttgggtatattatttttctaaaacgacaagcgaaaaaagcctgattcaatgaagtcccaatcctgagcgcgtcatcgattagaatggattcgaaaataatcccttgataatgaatagatggaagtattatctctattcactaccaagggatttttatatgtgctgcgttattggttgttcggttaattaggtttaaaaaagagggaatggattttatatcacgttatttacgaatgatattcataaacagtggttttttgatgccatttaacgtataataaattaaaaacaaattagagatgaggcaagaatattgatttcgactgaaacgacactagctgggtaccactttgataactgtttcatgaacgcggcgggggtttattgttatgatgctgctgagttaaatcaagtgcaggcttcaatggcagggactttcgtgaccaagagtgccaccgttatgccccgctctggaaatccagaaccacgttatcaaccaacgcgtttaggcagtatcaattcaatgggcttgccgaatgaaggcctaccttattatttagactatgtgagtcaacagcaaaaggcagtgccagacaagacatactttcaatcgattacgggatttaatattgaagaagacgagcaactgttggcacagattagtgcttctgattttaaaggtgtggtggaattgaacttatcttgtccgaacgtaccggggaagccgcaaacgggctatgattttgaaatggtggaacgaattctaacgcgagtttttacggtttatcacggtccattaggcgttaaattaccgccgtactttgatatcgtgcattttgatcagatggcggcgattttgaatcaatttccattagcgtttgtcaattcggtgaatagcattggaaatggcttgaaaattgatgtggcaactgaacgggttgtgattaaacctaagcatggtttcggtggcatcggtggcgattatatcaaaccaaccgccttagcgaatgtccatgccttctatcagcgtttgaatccagccattcaaattattgggactggtgggattaaatctggtcaagatgcatttgaacatattttatgtggggctagcatggtccaagttgggacagcgcttcaaaaagaaggccccattatttttgaacgtttaacgcgcgaattacagacaagcatggctcaaaaaggttatactaaactgtctgactttagaggcaaattacaatatttagattagttgaaatgaggatttacaatgcagtatcgttatttattttttgacatggacaatactttattcgattttgatgcggatgaagatcaagctttggcccaattattcaaagatcaaggggttcaattgacctcaacaattaagacaacttatcagacctttaatcaaaacttgtggcggcagtatgaagaaggtacgttaacccgggaaatattattgaacacacgctttgcaaccttctttaaagaacagtttaatcaggaagttgatggaccaagattgtcccaaaattatttagacaacttggcattaggccatgatttaatgccacaagcagaagctctgttaaaggcgttaaaagcagctaacattaagctatatgtcacaaccaacggggttgccaacacgcaatatcggcggttacaagattcaggattaatcacatatttcgatgccgtttttgtttcggaagagttgggatatcaaaaaccagatccacggtatttccaaagtgtcttccaacaattagaggggatctcacaagcagaagctttgattgtcggtgattcacttacttcagatgtgcaaggtgggcagaacgtgggtgtcgccacagcgtggtataacccgaaccagctagcaaatcaaatgacagacatacagccaacacacgaaattgaacacttaatggacttattggcaatttaaaagccgatttgcggcattcaagaggagtagataaaacatgaaaaagcaacgatattttagaattagcctaggttggcgaatcttaattggaatcggcctagggttagtggttggtcggtttttctaccataatcaaaccgctatctcaatcttacaatcaatcggaaccttgttcatcaatttaattaagatgattgtgttaccaattgttgtttcctgtttggtcgttgggattgccaagatgggtgatatcaaaaaacttggccgaattggtggtaagacgttattgtatttcgaagtgatgacgaccttcgcaattattctcggattagctgtcggcaatattgctaaaccaggagcgctgattgacattcatagtttggcacatggctcaattagtcagtacacagcagccgctaagaccgctggaaatcatggcttgggtgatatcatcatggatatcgtgccaacgaatttctttgcggccttggggtctggtgaaatgattccagtcatcttctttacggtcatgttcggtttagggttggcgacctttggtaaaaaggcaaccccgctcatcgatgcttttgaaatgatttcagaggttatgttcaagatgacaaactggattatgcagttagcaccaatcggggtgtttgcattaatcggggttacaattgcccaattcggatttgaagctttgaaaccattgctctatttcatcatcgtttgttacgcaacgatggcatttttcgtggttgttgtggctgggttggtcgcgcggatttggcacatcaatatctttgaaatcttgaaagttttcaaagaagaattggtgctagccttttcaacggcgagttcagaagcagcgttacccaaagtaatggaaaaagtgcaaaattacggtgttagtcaagggattgcttcttttgtcattccaacgggttattcatttaacttggacggttcggcaatctaccaatcgctagcggcgctgtttttggcgcaagcctatcacattcatttaagcctcacccaacaaattactctattggtggtcttgatgattacctctaaagggatggctggggtccctggtgcttcattcgttgtcttattagcaacaatcaccacaatcggcgttccggctgctggtgtcgccttcattgcggggattgatcggattgtggatatgggacgaactgccgttaacgtaatgggaaactcattagcagcagtcattattgccaagtcagagaacgaatttgatgaacaaaaatatcaacaatatatgagtggcaatgaacttaaataaagcaaagaccttaaatcaatcgatttaaggtcttttttgtataaaaaacgattttagcacaccgcaaacattagcggtatctaattataacccaaattaaccagcgaccgcttaaaatactcgactggcaaacaccgtatcaggttatgctgacaaatttgtccaaaaattcggattaaatttgcaatctacctattgatatttctaaaatacattaacatgatatttacttaaataccattagctaaatcacgtgcgaattttgccttagaaacacccatagattgcagatacccataaggatcaacatgatcaacttcatgataagcattagaaatccaaagatgtgttttaatgccttttccatcttggtcaagcttatatgatattcctgcttggtcagccaggaatcttagcaaccgtacatatgcctgataatcctttgcaaacgttgcttggtcgttagttctcgctaactctacttgagcaaaagccttaccatttcctgttggaccacatccccagctcatccgtcctactggtgctgtctgaataatccgaccaccgtgaccaacccaatgagtaacgtatgcactggtccagtgatctttcatgtaagcaacttcattttctaatgcattagggttacttgcttcagctggtgtaccagattcatgtgcaacaataaattcattggaactagtattattaggtagtccactaatcatatctttattaactgtaatcgttttagcatgcatatcagaagctgaaacgtattgattagttccaactctataccaaatggcaccagtcttatcaattgctttttgagtgatcacccaactagaatatactggtagatttttaactttattattgaggctatcgcgcgtaacagcgccattatagtttgaaaccatcagcacaccagaatatccttcaaaacgttgaaacatactttcttgttgatttgtgacttcgttagcattgacaaattgatctgaactaactttgtaccacttagttccataaccatctgtaccaataccgctaacttgccagcgggtttgatacttcaaatgaccattgactttaccaactgaatttctagtatctgttcctttattatttaaaacagtaacaattccctttcggtcttgaatgttattaatgtgttcttcggtaccatctaacactctcacatcttttgaagaaagatattcttctccgctaaccttataataaactgtcccatcagcggcttggactgttgaagaagctaaccaattggacttataaggtaacttacgagtgatttgtccattatttgtcataagattaccaccagcaccgttagtgattgacagcgttaccgttccaattttttggggattatgaaatactgattgaccctctaaataacagtcactagcacggatataagcatttgttgagaccatataccaaacatccccaaagacatcagtcccttttcggaaagtttgccatctggaattcatgcctaagtagcggaacatctcgccagaattagaaaccatagcagttccctgggctgctttgacttttacaatgcctttaatatttgaggttgaaaccatcatattggttccgtataaaaagacatcttttgctaaaatatattctgtgccactaactttataccaaacctgaccagatttatcgattgcttttttactgattaaccaggctgacttaaatcccagtactctagttctagcaccggttttctcatccattaatgttgttccctgtttattcttaactctaattttaccttgaatatttgtaatctgcgtcaatccagacacttgtgccgcttttgtttcaccctttagggtctcctgtaccgattgagcagagctactactagcagcttgagtgttactctgtgtgtcagactgagttaaagcactcgactggtctgaacttgatacttgattactagcactcgtagtaagctctgattgacttgtactcgtcagctgcttagatacaacgttggcttgactcacattttgagtagctgcttcagcagaatgcgcactgatcacctgcaataaagcaatggaactgaccattattagtgaaattttctttttattcatacgtaaactccctattttttccaatcgactagcccgtcattaaaatgatttttatcggtaaacttaaatgtttcttgctgcttgtctttaccagcatttttaaccttaagtatttgttcaataatcaaactatctttcgtttcctttaaaatttgataggtcccccggttagtcataccactcgcatccgatacctgaacaattgtgccatcttcattatatgtaactttagtatcgttactataccaggtaccaagtattgaatattgaaattttccatccgtatttttcccagaagttgtcgattgagcacttgaacttgtcgccgattttttagtactgctcttttcgtttttttgtaccgttacactttttttactagaacttaccttggcctgatcagttttattcccacaagcaaccaacagtaagctcattaaaataatagtgacccccacgcttcttttcttcaaataaatccccccactttttcagttcctataaaaatatagcatatcttaagaaatattcaaatattttccttcacatctttaattatttaggcagttactcttcgataataaactggtttgaaaataaacaaaatactgtcaaaaaactgattaaaaaactaattctagcgaccactgtatatctataactgacatcaatttgattaatcccttttttcaaattaagacttactgtcccaaattttgttctatcaggtacggtattttgattattaattctagtaataattcctttataataaagaattggtaatttaattttactattctcagttgacttaaccgtcattttaaaatgatccttactaatgattctcattggtttaatctgaccaccattgtattcttttttaactattagatgttctgtatttaaaagagccgctttaggatagtaatctttttgtctaaagcgtttgattttatttaaatcattatttctgattactgataattcagggggaactgatgtctgggcatgccaaagaattctagcacctgaaatcaacgttatcatcaaaatgattatgactaacgacggaactaatctccagaactttcccatatatttagccccaactgaacataaatgcgctaaataaagtgctacaaaaaagcaaaaaatatttaaaaaacgaccaggatattgaataatgctgactggtgtttgctgcaatgcccaccacggtataaccgtcgtagtcattattaaaatcactagtgaaattatccctatcgttcgatataatgttttttctaaccagactgtcataagtattattaccaccgtgctcagaaaaacaatccctatcgtataggttctaaaatctaatgaaaatgaatacctaattaattgttctaagctcttggttacttgcttaaaatcaaatggttgaggcatattaatcgtttgaaatcttttttgttccaacattggtccccaataagccattgtcatagtcaaacaaccagctacaaataacaaaaattttttcgttatatagattaagtaagtacgattaaattttttttgaactaaaaagctgaataaaacacagcataaaccaaaactagtcgttacaatagaaagtacatgagaatacaaaataagactaaagaaaataatcacccaacgtaactgttttggctgttgtcgtaataaattataaaagcacaaaaataacggcggtataaatatgtaagcaatgtattcacctaacccccaacggtacattacactagaattacgaatgaaagaaaaagtataaatcaatgcaaataatatgccaaataactgttcccctgagaatttaattgctgatatataactagaaactagtgttaaaaaagttactaaggttagaaatagtaaaaatccagataccggtccgaatattactgtcaataaatgcatcgggtaaattgtcaaccatggatagaataatgctgtggcatttccaacaccgccccaatcattaaaattgattggagaataccaaatatgtcttaatgataaagcgcgattcagatgaaaataaccatctaaactatcgcgagcaattaatgtatgctggggtgccatcaaataagtataaaaaatacttagtacaacgaataaaatgataatacctattaatttattatttttcttaacaactttaaccattcagtcacctttttttatctaccaatttattttcagtctaattataccccaaaaaagcacaaaatgccccccgatttaatgggtaacatcttgtgcttttccgtagttatctttccaaataaaattcaaatcgttcgcccacatattgggtgcggacatattcgaaaggttcgccgtttgataagaaggaaacttgtcgtaatttcaagattgggccattacgcttaatgtcgagatattcggcaattcgttctgaggcgagttgggctgagacggtttgttgtgcaccgcccatttcgtagccccctttttcggctaatgctttatagaaggaagacgtgatttcagctttactgaaatcggcaactaagctttgtggcacggttgccacttcaaaacagatgggcatattgtcggcatagcgaatccgttccatgcggagcacctgctcgccatcttttaactggagcttttcagcttcgctaagtgatgggttggcaatgtggaacgaaatggttttactagatggctgcttaccttgggcagtcattagatcggtaaaactagtgacgccggacattttttcttggactttccgattagcgacatatgtcccagccccaatccgccgttccaaaatcccttcgtcaactaatgtttgtacggcttgccgtaatgtcattcgtgagacttcgaaatttaaagcaagctcccgttctgaaggaattcgatctccaatcgaccacttgccggcttcaatatcctttttaagttgattatgaatttgaatataaacaggtgattccatgggacacactcctaaatattaatgttgatagccgttcccaaagctgtaagttgcgactaagttttgttgatggtctaagatgttgaaatcagcatctcgaccttcttctaatttacctttttgtgttaagccaaattcttcggcttggttgacacttgacatcataacggcttcaaacgtttcacaacctgtgaatgtttggatgttcttgaaggcatcgatatatgttaacactgatccggctaaagtgccatcttctaagcgtgcttgtttgtctttaacaatgactttttggccgcctaattcgctttcgccttcagcaatccctttagcccgcattgaatcagtcacaaggtcgatccgttctgcacctttttgttcgtaagctaatttaatcatatcaggtacgatatggaacccatcagcgattaattcagcgtacatgttgtcttctagcatggcgtgacctgtcacaccaggttcgcggtgcttgaattcacgttgggcattgtataaatgggtaacgtgcgttgctttactttcaagcatttgttcacgcgttgcattactatgaccaactgaaggcacgatgttgtgtgctaagcagtagtcttcgaatgcttttgaaccaggatcttctggtgcataagtaattaaacgcacgcggttacctgataacttattccattcgtccaataaatcaacgtctggatctttgatgaattgttctggttgagcacccttgaagattggtgcgatgaatgggccttccaaatgaacaccttgaattaatgggttcttttcagccgctactttaacaccgcgcatagcattagcaatgttttcgtttgattgcgtcatcgttgttgcaaataaggttgtgaccccttcattttgcatcatcttagttgccatttcgtcgatttggtcagcatcgccgtccattgcatcaaaaccataaccaccgtgacagtgaacgtcaataaagccaggaatgattgtcttgcctttaacgtcttgaatttcttcgccagcttgtgccttgtagtcgaacattgggcccactgccaaaattttatcatcgaaacgaatataaccgtcttcgataacgtcgtcacctgtatagattaccgcatgttttaatacttttactgccattatccatccacctctatctttaaattacctctagtataaatggtatagaccaaaaaaacaagggattccgactaaactttgaaccgttttcttgttaatttgctatactatatttatccattcatattaaggagtttaatgatgttaaaaatcggtgttattggactaggaaacattgcacaaaaagcatatttacctgtaatggcgcagatgcaagaccgggtcgattgggtcttatgtacgcgccaaccggctaaattagcgcagcttcaagcgcaatatcatttagaaagtggctgcctatcatttgacacattactcgaacaaccactcgacgcagttttcattcacaccccaactgcaacccactatcaatatgttaaacaagccctgctccatggtttacacgtttttgtcgataaacccttaagtgaaaatccactggaagtcgccgaattatacaaacttgcggctagcaaagaacggctcttaacggtcggcttcaaccgccgttttgccccatttttgcaaaaattaaatcacttacccgataaacaactgattaacatcactaaaacacgcgtggcaacgagccaaccaacgccctttgccatttatgacctgatgattcataccattgatacggcgcttttcttggctgattcactaggtaccaattacaaaatccgtccatactgtcagcaggatgcaaacggcaatttgcaactcgcacaattaaccattgaaacaccgcgccaattaatcagcgcgactttaaatatgcaaagtggtaccaatcaagaaattgcaagtctccagacaccacacgggttattcactgtcgataatctaacgcgctacacaacacaagcggcagaagacagtcgcattcaagttgcagctgactggacgtctacgcttgaaacgcggggctttgcgccaatgattgatgcgtttattactgcccttgaaactaacggcgcaaatcctgtcccaccagaaagtagcttactcacccaccaattctgtcatgagatggtccattttacaaaataatataaaaaagcgtaacccaatacagtatttgtatcaggttacgctttttacatgcttgagcgcactctatttttggctttctaaatccttcgcaattgttgcgtcgatgcctttaaccactgctgtcattaagccggcttcttccattgctaataagccggcgacggttgtgccacctggtgatgaaacttgatccactaagtcccaaggtgaatcatcactcataagcacgttttgggcactccctaaaacagcttgggctgcaatttcagttgcggctttctttgttaaaccgtgtttaacgccggcccgcgccattgaatcaatgaataggtaaacaaatgctggtgaactaccggcaagcgcactgaaagttgtgaaatctttttcgccgatttcaaccacgccccccagttgtgcaaggacatctttcacacgagccaattggtctgcattgacttgttcattcccaacaacagctgtaattcccgcgcgattggccacgttaacatttggcatgatgcgtagaattggtaaatctgcagcagattgttctgctaatttatcaagtgataaacctgctgccattgaaaccatcaatggttgatgtgctttaaaggctgcatttgtttctgctaaaacctgtggcacaatatatggttttaccgctaaaaaaacgatgtcggcttgttcaaccactgaattgttatccgcaacagctgtaatccgttgttcagctacaaaatccgcatagttcgccggatgtccgccatgcactaaaatatccgttgttgcgacttgattagctttcactaagcctttaatcattgcttgtgccatgttaccgacaccaataaatccaattttcattctgccacccctttttttatttatccaaggataccgaacgagcggaggaaagtcaatccaggacacaaaaaaagacatcttagcaagatgtctttaaagtattgggctagctggattcgaaccagcgcatgacaggatcaaaacctgttgccttaccgcttggccatagcccaatcaagtggaggagagtggattcgaaccaccgaacccgaaggagcggatttacagtccgccgcgtttagccacttcgctactcctccatacgtttcatctcatcgattcaactatattagtttacaaaattctgacagaaaaatcaaccccaaaatgcaaaaaaaatcttgattattgcataaataatcaagattttttctaatatttagttaacgccttccattaacttatgaattggtttaacgaagaagattaagacgatcccgaagatggcactcacaatcccaatccctaagaaatatctaatttctgtttgtggtgaatataaacgcacaagctgtgcattaattgcttggcccgcagcatctgctaagaaccacatactcatcatttgtgattggaatgcctttggcgctaattttgttgtaattgacaacccaattggtgaaattaacatttcagcaatttcaacgatgaaccatgaaccgattaaccagaatgggctaactcggccagcggtgccgtgtaataatccaggaagtgccataaacatgtatgataaaccagcgaagattaaaccaacagcaaatttaccaggtgcagatggttgtttcttccaagcactccataaccatacaaagaatggcgttagaagcataataaatagtggattcaatgattggaaatttgatgcagctaagctatgcccaccaatgtttagaattgtccgatcttctgcaaataaagctaggacaacggagccagattcttcaattccccagaagatagcagctgcaataaagagtggaatataagctataacgcgtgaacgttccttcttagtcactttcttgctgcccaacatccgtgagaagtacacaattggtaatgcaatcgcaatgattgaaatcatcaagacaatgttatcaatgtttaagttgcctgtaaattgcatacctaatactacggcaacgacgaccacaacaccaatcacaattttacgaataacgcttgataattcttctggcgcaattggatcattaggttttgaattttctttactgaattgagaacgaccgcggtagtattggattaaaccaaagaacatcccgacagcggctaatgagaagcctaagtgaaaatcaattttttgaccgacagccccaacaagaattggagcgacaaatgagcccaagttaatcccgaagacgaacatactgaaaccagcatcacggcgacgatcattttcactatacaaactaccaaccatttcagaaacgtttggttttaataacccagtccctgcaacaatcaaagcaattgaaataaataaagctgtcgcacccatcggcattgctaaggcaatatggcctaacataatcaagacaccaccgatgaagacggttttgaagctcccccagatccgatcacttaaccaaccaccaacaacgctggctaggtaaaccatcgaaccatagattgccatcacagacattgcagtcgtcttgtcaaagccaagaccacccttatctaaagcaaaatacatatagaataatagaattgcacgcatcccgtagtagctaaaccgttcccacatttcagtgaagaacagtgttgatagcccatgcggttgcccaaagaatgttttttcttgtttctcttccattgtaataccccactttaaaactttattattacggaaactaagaatttgatagttattaaattgaatcgactcatctatacaagaagtctcttatcattcgcttagaatctataaaggctattataatcttattttaatcttaaatcaattcttttttcaacattaactgcattgtttgcactgattttttcattaaaacaagttattttatgattcaaaatgactaatgcttattcttaaatgagaaaatgctcatgatacctaacatgttcttagaaaactggtttgttgcctttaaacagtagtacaatgaactaatagaaagcgagctgattccgatgaatccttttacactaacatctcttattccattacgacctgatcgttggctaacttactacgaagcaacgtatcaaaatgaacatggcgatttaatgccttatcattttgtcagtcgtgactctaacttaaccatcgagactttaaaacgaccagctaatgcctcagcggttgcaatgttctgctacaatcaaaatcactcacaggtcttactgactaaacaatttagacagccccttaatgattttgtctatggtaatcccgccggtttagttgaaccaactgagtcgattgaacaagccatttcccgtgagttaatggcggaaacaggttactctcttattgaggttgaacattgctttgcgccaagttattcctcaccaggccttactgatggcgccgttagtctagcaatctgtactcttgatcaagctaaacaaacagaccgtacacttgaagtggatgaagccttaagtaccctgtgggttaatcgtgctgaagcacagacgatcttagccaataaaaaaatgactggacgcactcagattctattatggcaatgggcaaatgaacaataagtaatagccagttacgattttcgtaactggctattttagtggttgctttacaatcaaattgaatattaaaaaagcattatactaacaaaacgtcagtacaatgctgattatcccgattagcacttggtagaaacatgctattgatgccggctgcaggagtcgaacctgtgaccctcggtttacgataccgatgctctaccaactgagctaagccggcattattgatgacccgtacgggatttgaacccatgataccgccgtgaaagggcggtgtcttaaccacttgaccaacgggccgaaataaaaaacgattgaagattctcaaccgttcaaaaagacgattgatgaacccgtgccattgcacttgcgtaatgcggcgacgaaattgatgaaggaagtcggttacggcaaaggatatcaactcgcacatttctacgatgatagattgaccacgatgccaactagaccagagagtatcgccgaccatatttattaccggccgaccgaacaaggcaatgaaacgcggatgaaacaacgtttgaattacattaatgaatggaaacaaaagcacaatactgattttcaagataaataaaaagtcgcagtcatttgactacgactttttaaattaagcttcttttgccactggacgccagaggcctaagattagggcactgacaaatgttccgattaacacggcaagcacaaagagtaggccgtggttggcaagtggtgccacgaagatcccaccatgtggtgcagggacagtgatttgccataattgggttaaaccaccaccgattgctgaaccgataacacttgaaacaatcacgtgtaacggatctgatgcagcaaatggaatggcaccttcagtaatgaatgaaatccctaatacatagtttgcgaaggcttgtttccgttcactaccggtaaatttgtttttgaaaatagtagcagcaaccgcgattgccaatggtgggaccatcccaccagccatgacagcggccatcaatgaaccatctttggtggttgtgaagacaccgattgcgaaggtataagcagccttgttgaaaggaccgcccatatcaacggccatcatgccacctaaaatcgcaccaagtagtaatgcgttaccagcccctaagtgtgttaagaaggtactcaaccagaggttaatttgagcaaagactgggttgatcatgaagtacataataaagccaacaatcaatagtcctaatacagggaatattaagattggttttaaaccatcaagggtttgtggcaagttcttgaagactttcttcaaaccaacgatcacccaaccagcgatgaacccagcagctaaaccgccaaggaatccggctggactctttgaagcaaggacactggctgttgcttggctagccatgtagcccccgacaaatccgggcattaaggcaggccgatcaccgattgaaatcgcgatgtaagcagcaaggaccggaattaagaagttaaaggcattattgcctaatgagttcaagaaaataaaagtggttgaatgtgcgccaacggtttgttccaaaaggaatgagatggccatcaagatcccaccaccgacaacgaatggtaacatgtttgaaacaccattcattaaatcttggtagatgcgactccaaagggttttcttgtcagctgaagcttcttcgcttgattggctttcagttgcgtgatagattgagccttcttcatccaatgttttttgaatcaattcagctggtttcttgatgccgtcgatcacgggacggttcaagagatgtttaccatcaaaacgaggcatatcgactttcttgtcggcagcgatgataacccctgttgcgcggttaatatcgtcagcggttaattggtgtttaacgccttcagaaccgtttgtttcaactttaatgtcgatgcccattttagcagctgtttctttcaaggcagcttcggccatgtaagtgtgggcaatcccagttgggcaggctgtgacagcaacgatgaatggtttttgatcatcagctggcgttgcggctgcggctgcggcttgtgctttagcggcttcttcagcttcttccttcgcatcttctgcgtctttagcagcttgagccttagcaaagagcgtttgcacgtcttctggtgtttgggcttgtttcaaatcagcgactaattgtgggttgattaaaagggatgaaagaccagccaaggcttgtaaatgcgtatcgttagcgccttctggagcggcaatcatgaagaacaagtaaacgggttggccgtctagtgcgtcatattcaacaccgttttgacttttagcgaatagcacagttgcgcgttgaacggcactgtcttttgcatggggcattgcaatcccttcgccaattccagttgatgattgggcttcacgagccaaaatatctttacgatagagggcgtcatctgtgataacaccgatgtctttatagcgggcaaccatttcatcaacagcggcttctttagtcgttgcttgtaaatccatgatcatcgcatcttttaagagtaaatcttggatgttcataataaatctcctttgtatttaaaattaatcaacttgtgtgatttcaatttgaggtaagagttcgttaatcttagcgctagtggctaaatcttcagaaaaggcggtggcactaccacaagcaagacttgttttaaaagcggcgagtgcatcgtgatgttgtgcgaatgtgccgacaaaaccggcgatcattgaatcaccagccccaacggaattaatcactgtccctttaggtgtaccaccgaggtaagcgtggtctggtgtgattaaaagggcaccgtcaccggccattgagaccaagacatgttgggcaccttggtctaataatttgcgaccagcggcgatgatttcactttggttggcaaagtgtgtgtcgaacagttcggccaattcgtgatggttgggtttgatgaccaatggtttttcagccaatgtgtctaacaaagcttgaccggttgtatcaattacaaattcagcgttgtgcgcttgaatcaatgggattaagtctttgtagaaactagccggtaaattaggtggcaaactcccagacatgaagacaatatcgccggcttccagcttagccagttgttgtttcaagttggcaacggcttctgctgaaatgtgtgggccttgaccgttaatttcagtttcttcagtattgtcttttaacttcacgttaatccgggtgtcttcttcgacttcagtgaatcgacagtcgatcgaagcgttgttgagtttgctttgaatgaattgaccagtgaagccaccgacaaagccgagggcaacgcttggtaatgctaattcggcaaggatgcgtgaaacgttaatccctttaccaccggggagcttaacgtcagattggacgcggttcacgttaccggtatttagtttttcaagttgaatgacgtaatcgattgatggattcgccgtaatcgtataaatcaagataaaacctcctggatttctgtgtgtgaatgatagtgtttgtaaacagatggtgacaattgatcagtaatcaattggacttgtgccaatggggcaaacttactgaacgaaacagcgtcgaattttgtgtgatccgccaaaaccatcgtttggttcgcttgttgaatcgcaaagcgctttagagtggcttcttctggatcaggggtggttagcccagcttcaacatcgataccgtttgtgccaagaatcgcctgattgaattggaattgcaaaagggtttctaaagcagccgcaccgaccatcgctttggttttgctcttaacacgcccacctaatagaaaggtttgaatttggtgatcggctaagagagaagcggtatcaaccccattggtgacgaccgtcaaattcatttcaggtcttaagtaggggatgattgcctgggtcgttgtgccggcatctaagtaaatgacgcagccttgttggatttgtgctgcggcaaacttagcaatcgcgtttttttcatgaacgttcttgccgtttttttcaatctggccaagttcttcttgtaacgtgttgatgcgcttagcaccaccgtgaattcgagtagcaagcccttgttcttcgagcaattgcaagtcacgacggacagttgattcagaagcgttcaataactggcacaaagattgcatcttaacgacgtcttgttgctttaaaagttgtaatatcgcttggtgacgttcttctgttaacatgacaaaacctccgtagcatcattatgacatcgtttccattcaaaagcaatcgaaatatttcaaaaacgttcaaaaaccatcaaaacgctgatatagaccgaaaaaaagattggtgcgttagtgagcaaactgcggacaatgccagaaatagaccagtttaaaagtaatgtaagagttttcaaaagtgcttaaggtatgctagactaatagatgacagagtggtatagcccaattattaggaggttctattcatgggaaaactaggcgtttcaatttatccagaacgatcaacttttgaaaaggatgcggcttacttagatttagcgcatcaatatgggttccaacgcgtctttacatcattattggaagtgtctggcgatcaagaagccgtgttaggcaactttaaacgggttgtagcccatgccaaccaattaggaatgcaagtcatgattgatatcaatccgggtttgttcaagcaactcggtatttcatatgataatttaagttttttccatgaacttggtgcttggggaattcggttggacaacggttttaccggccaagaagaagcggaaatgacgcgcaatccgtttaatttaaaaattgaaattaatatgagtcaagggacaagttacgttgataacattatgagttattcacccaaacgggaaaacttgttaggctgtcataacttctatccacatcggttctcaggattaggtgaagacttcttcaaacaatgtacggcgcaatttgcaaaatacaatttgaatacagcagcgtttgtcaattcacatgaagcgactttcggaccatggccaacacaagatgggttgcccacgatggaagttgatcgcgatttaatgatggcaacgcagatgaaacattacgttttaatggataacattgatgacattattgtcggtaatgcgtatgcttcggaagcagaattgaagacgatgcatgacgtctttaacgctgaattcccagcaatcgcaatcgacgtcgcagatgacattacggctgatgaacgcaaggtcctctttgaaagtctgcatagttatcgtggcgatcgttcagaatatcttctacggtcaacgatgacacgggtcatttttaaagacctgcctttcccagcccaccatacagttgacatccaacacggtgatattttaatcgataacgtcggttacggtcagtataaaggggaaacccaaattgccctcagagccatgccaaatgacgggcgcgtgaatgtggttggccgtattacgcctacagaattattcctattagactatttgaaaccatggagccaatttaaattggtgccagctagccattaattaacgaataaaaagcgtactgattgaggtcactcactcagtgcgctttttatcgatgatagagccaattcagtgtttaaccagttatctgtttacttttaatctttttttcggtagtatataaggtactgtttaacgatgagaaggagtcaaaatatgtttgtagatcaagtcaaaattgatgtgaaagctggtaaaggcggcgatggtgcagttgcatttcgccgtgaaaagtttgtgccacttggcggaccagccggtggcgatggtggtcggggcggaagtgtcattttagtggtagatgaaggtctacgaacattaatggactttcgttaccgtcatcactttaaagccaatagtggtggtaatggtcagaataaacaaatgtacggccgcggtgccgaggatacatttgttcaagtgccacctggtacaacggtgcgcgatgctgaaaccaatgaattactcggtgatttaaccgaagatggccaacaattagtgattgctaagggcggtcgtggtggtcgtgggaatatgcatttcgcaaatgcccgtaatagtgcgccggaagttgccgaaaacggtgaacctggtgaagaacgcagcattcaacttgaattaaaagtgcttgctgatgttgggttggttggtttcccatctgttgggaaatcaacgttgttgtcagtggtgacaagtgcgaaacctaagattgctagttaccaatttacaacgttggtccctaacttagggatggtgcaactcgatgacggtcgggactttgtcttagccgatttaccggggttaatcgaaggggcttcagacggtgttggtttagggattcaattcttacggcacgttgaacgaacacgggttgtcttgcatttaatcgaaatggacgatcaaacgggtcgcgacccatttgaagattaccaacaaattaatcacgaattagagacctatgatccaaaaatcttagaacgaccacaagtgattgtagcgactaagatggatttaccaggttcttctgaattattagccgagtttaaacaaaaattagcagctgccggcgatacacatgagatttttgaaatttcaagtatcacgcatcaaggggtgcaatcattgatgaacaagacagctgacttattagctgaaacgactgaattcccaatgggagacgtcgaagaagttcaaacgcaaaaactttatcaatatcaaccggaagcacctgctttcatcattgaacaagatgaatacggcacgtttattgtgtctggtgacaaggttgaaaaactcttcaagatgagtaacttggatcatcaagatggtgtcatgcgttttgcccgtcaattacgttcaatggggattgacgaagccttacgcgaaagtggcgcacatgatggtgatttagtggcaattgataactttacgtttgaatttgtcgaataataggcacgtcaagaaaggaagacattcatttttgaatgcttcctttttctatgggatgcataaaataacagggcttaatgtaggcacatcactaaaatattgttataatagcagttattagaatgtagagtaggttgaaaaaatggcgggcaagaagcgtttaaagaatagtcgttacattactggctttgatggtttacgcgcaatcggcgtgattggtgttattttataccatctgatgccatatacttttaccggtggttatttaggggtcccaatcttcatggtggtttcggggtatctaatcaccgatttattggttcaagagtgggaacaaaatcaatggattaatttaaaaagtttttacttacgccgggtaaaacgattgtaccctgggctgataacgatgctgtttgcaacgggcgcgtacatcacgctttttcagcgggaaatgttacagcaacttaatcagattattatcacgaacattttatacgtttataactggtggcaaattggacatggtcagtcgtatttcgatcggtttgccaataatgagtcgccgtttacccatctgtggacactatcgattgaagggcagttctatctaatttggccttttatcgttgtggccttgattattggtcttaagaataaaagtcggattgcccaagtattactagcagtcagtgttgtttcagcaatctggatggccattttgtaccaacccaatgctgaccctagtcgtttatattatggaacggatacgcgggtcttttcaattttactaggagcagcgctggcgtttgtttggccatcaacagcccttaagcaaaagattgtgcctaaacaacgcctcgtcctcgatggcatcgggttagtgagtgtcctcagtttggtttggttaatggttaagttgaatgccgagagtagtcttgtctatcgcgggggactatttctgtttagtgctttagtctgtgttttagtggcagttgtcgctcatccaggcgctgattggaatcggttattgacgaatccggtctttaactggttaggtaaacggagttacgggatttatctgtatcaatttccggtgatgattttctttgaaacaatcttcaaaaatatcgctgatcacccggttttatatccagtgattgaagtggcgattattttcggattgaccgaattatcctaccggtttattgaacagccactagcacactatccgtacaagcagttatggcaccaattgaagcaatttatgcaccaaccacattggaatcgggtggttggtcgagtgactggactcgcaattgtctttttaatcgggttagtcggggcgtttcaagcgccattccaaccggcgccagatacgcataaatcggcattagcggtcaatattaagcaaaatcaaaaagctaaccaaaagcgtaaagatgcgttgattaaaaaagcaaaagcccagaataaagctggacaagcaaatggtccaacttcaaaagctgaaaaagcggctgaggcggctgcgcaaaagcatccaatcaaccaagaatttgaaaaatatggcttgagtcaagtgacgattcaacgggcccagaatatctcggtgactgcaattggtgattccgtcctactcgacggtagtcaagctttacagaagttattcccgaatatgttggttgatgcggctgttgggcgccaactctatcaaagtattcaaattgtaaaaggttatgatcaaaaacaagcccttagcgatactgtactggtcagtctaggaacaaatggcgcctttacgcaagaacagatggcgcaatttatggcagccattgggactaagcgaaaagtctattggctcaacgcgtttgtcccaacgcgtccttggcaaaatgatgttaaccaggcgcttaaaaatgcaactaaacagtatccaaacttaacggtgattgattggtattcacaggctgccaaacacagtgactggttctaccaagataaggtgcatccgaacccaactggggtcaatgaatatgccgccattattacgaaagccctcgcggcaaaataaagcgttgaattaaagacagattggaagagctaaatggaattagaatttttaggaacaggcgctggagttccagcacgacaacgaaacgtcacaagtgtcgcattgaaattattggatgaacgaaatgaagtgtggttgtttgacgtcggtgaagcaacgcaacatcaaatcttaaaaacgacattaaaaccgcgcaaagttaaaaagatctttctcacacatttacatggggatcatttattcgggttaccaggctttttatcaagccgatctttccaaggtggcgacgaaccacttacgatttacggccctaagggaactgaagaatacgtgcgcacgagtttaaaaatctctgaaagtcatttaacgtatccattgaactttgtcattcttcctgaagaaggtgttttgattgatgatgcgactttccgggttgaatgtgctaaattggatcatcggattgccagttatggttttcggattattgaaaaggaccatccgggggaactgcaagttgagaaactgcatgcagatggtgttccggctggtcctgtatacgcaaagattaaaaagggagaagtggttacactcgctgatgggcgccaaattgatggcaaagattacattggacatgctcaaaaaggacggattgtgaccattattggggatacccgccaatgtccaccaattgaacgcttagcggctaatgcagatgtattagtgcatgaagggacctttggtaagcaagaacaaaagattgcgcgtcaatatttccattcaactaacattaatgcagcaaaggtcgcaaaagccgcgcatgtgaagcggttattattgacccatatttctgcccggtacctcgggcaagcagtgcgtgatttacaaaatgatgcccgcgatatttttaaaaacacaaaagtagttagtgacttagatatctatgacattccgtttcatggtcgaaaggagtaaacagatgactaaattagcagcattgagagatttaaaccgtaaaattgtggtgattaccggcggctcgtctggtttaggacgagcgattgcctatgaagccgctagtaaaggggcaattatcgtcgttttggcccgtcgagaagctgaattggcggcggttcgcgaagaagcacaccggctttcaggacagccggcgtatgcatatgtcctcgatgtcagtgatccagcagcgattgaaaccattgtggctcaggtgcaaactgaagtcgggattccagatgtgttagtcaatgctgctggttttggaagttttgaaaatgcattcgacacatccatgaccgttgtggagcagatgttccgggttaatgtgctaggtttaatgtacatgacgcgcgcttttgggcggatgatgattgaacaaggtagcggccacatcattaacattgcttcaatggcgggcaagatggcaacacctaagtcggccatctattcggcaactaagttcgcggttgttggctattcaaatggtctacgcttagaattaaaaccatttggggttcaagtgactaccgttaatcctgggccgattgatacagctttctttgatattgcggataagaccggtaattatttgaaatcggtcgattgggttgttttagatcctgatcaactagcttatcggattgtgaaaacaatcgggcatgcaaaacgtgaaattaatgcaccatggttgatggcgatcggtgcacaattctatcaactggcaccacatatcggagactatgttgccggtaacttattgaataagaagtaggggggcagttttatgaaaaaacaaggtcgattaattacagtattggtcctagcattaattgtcgtaatttttgctgttttaaacgttgaaccagtcgccattaactttggattcacccatgttaaatggccattaatcatcgttattttggtgtcattattgattggcgccatcattaccttcttggcagcgactggcagcacgttgagccaacggaaagcacaaaaggaaatgaccaaagaagtcactgaattacgcgacaatcaagctgctcaaattaaagcagcggttgaagcagaaaaaataaagaatcaaaaagcatttgataaagcgttagcggataaggaagctgaagtccatgaattacacgcgaaaattaatcaaatcacacaaacaagtgatcatcataatgcatagaaaaagaggttgagtgaagtgaaccccaaatattggacgaaactttaagcagctttctgggttgtaaaaattcgatattcaatcggacttttacaacccagagcgttggcctttttgacgtgttttatttcttggaatattaaaaaaataatgatttataatgggaattaaaatacgaatttagacgactttttcattggtttggtatagcgggaagaatgctttttattatttgtataatacgtgttgtatgcttatcggtctaattgtttatcgcagtaatatggattttgtgtgtcgataatatttatggaaaccattatcgttttattatagtcggagttggtgaagcgtgttaagttaaatgtgttccaaaaataattttttaggagatgagactatcaaaaaagtagtaggtattttagcgttcggcattttaacgaccagttgcatgagtgttttacaagaagcaagggctacgaccagttctaattaccaaagtaagcaaagtgaggtgcttgatgatagcctccaacctaaggtgaggcaccagaagggtgtaacacgttcagaaaaggcgccatattcaaaactgtatattggccgcggtgatgttaataaagaattggctcggcaacaaagggccttgagttattcaagcttagagccttccggattatacgccaaaaaaggggacgtgctgacggtgagcaaaacgggtcaagacttgatgtcgctgacgattggctcgcctgagcgagatgttcagaaacgatatccgctcgtaaatggggtgacgactattacagttgaaaatgatggccctatttatgtgacgaatccaaatgattcaggcggtactagggtgtcaatctttgatgccactggtgaaatgccgttctttgatgcaaacaagacgagtgtcgaagattttaagaaacaaatgactgaaatgacagacgcaaaagatgttcaacttgttagtgatcgtgctttaattactgtgagttatgagatggcaaagaaatatttgggggatcccaaagcgttaatggctaattatgaccgattcctggtcgctcaagatcgagtttcagggatcagtaatgaaggtcggccggttaacttttcagatcgccatttacaacatttcttagaatcgccatcgtattatatgtatgcgacaaacgaatacatgggttttaaaggcgatgcagctatgaaaagtttattagaacttcaggatccttgggaatctggcatggaagtggtcatcagagacaacaaaaaccatggacatggagagaagttgtcgaatcgagtgttaatatttattcgttagcagcgcaaaaagaaatgacgggtgcgatgcctgatttagataagtattatccagaaatgcacgcctatctaaattctgatcataaaaacttcaatcaacaaggggactttgtcaaaatgacaatgtttgcccaactagcaaacacctttggcgatgatttctacccgatcttacatcagtattatcgcgaaaatcagttagcctatgattcaaatgaagatcgaatgcagcattttttgttacatgtctctgaagtaacgggctataatatgctcccttattatgaacaatggggatttaaagtttctgaagaagtacagaagaaaatcagcaactacacaacgttgtctgacccaatttggttaaatgacaatcaaactaaaaaacaattgccaatgagcttaatgaaggctgtgtcgctcagtaaacaagggattaaagttgacttaacaaactatcaaattaatatctttaaggatcagaaattaattgttaagaaaaatggcaaggtgatcgcggagttggctgataagaaaccagctaatgggacagttattaatgatatttggcagattgatgaaccacttgatgtaaccgatatgattatcattgaacaacaaaatgccaatgggacttataatcggtttaatcaatcgatcagtgggacttcgcttagggaacaattggaaaactatttaaacacaacaaaaccaatcgagacgattctaacgcaagataaattaaacaatctacgccaacaggttgatgcactacaacctaatactgataaagaagaattaatggagatggttaaaaagctccaacaaagatatttagacgtattagttggtgaaattgaactgaattcagaatcagaacttgtggtgacatttgctgatggaaaacttaaggaatatgacgatttaaaagttcaagcagatacacatacgattgctcaagtaacgaatggtaagccgaatgttggtcgtgttgaaggaaatcaattgattattccaaaccaaaaagatgccactgcgatctcgatagcggtgactttaccgcatggcacttatctagtgaaagtgattagtcaagaggtgcttgttgctagaaagttagtatcggatttatttgaacaggacggtaagttgaaaccaaatgtgacgcaagaagtgttagatcgagcatggcagcaagtaaatcagttaccacaagacagcaaagaagcgctagcgaaaaaaatgaaggaggcacaacagttattcttgaatgcgcttattgcggatgtaacgcttaaagatgccaaaatgatggtgacttttgcaaatgacctatttaaaaaatatacgattcttgtcatggaagaagaccacagcatagggacaatagtgtttggccaggcctttgagggagaattaagcggcaatgtctttacaccaatgcgtttaacagtttcgggtaaaacgtatcgggtaaacgttatgcacaatagcggtacctatcaagttaaaacgttggtagctgattgatgggttatagcgaaaccagataaactaatctaaaggcttttttatgaaattaaattgaaatacaaaattgatatctatcaataaaggctgagcaatagtgctcgcctttttatttggtttcaacatttgataatccccatttccgtggtagtctgtatataaagcattatcagatggaggttaggcaaacgtggaaaatggacgacttagacgtgctagtcagtttaataagacacggtttcgctttgtgggcaaagggttattagttggggcgttcactggattggtggtcagtttatttcgcttagcgattgaaaaaggactggcctttgttatcactatctatcaagggttaaatgcacacccgtggtattgggtgccattggttggtgccaatttattgattggcctgcttgtggcacaattattaaaaaaggaaccgaatataagtggttcggggattccacaagttgaaggacaattggaaggtgagtttgatttcaattggtggtcaatcctgtggcgtaaattggttgggggcattttaagtattgcacctggcttattcttaggacgagaaggcccatcgattcagctgggggctgccgttggacagggggtcgccgctaagttgttaaatcgcggtgctgatcgtcggattttaatcgctagtggggctgccgcgggcttatcggctgcgtttaatgcaccaattgccgggacctttttcgtactagaagaaatctaccataacttttcaccgttagtttgggtgacgtcgcttgctagcgcaattgcagcgaacttcatttcattaaatttttttggtttgacaccgacattacatattacgtactcccaaagtttgccaattaatcagtattggcatttgttgatacttggtgtcgtattaggactgttgggatacgtttatcagaaggtattattgtggttaccacaactttatgcgaagctcccgctgccaaaagcgtataccggattagtgccattattatgtgttttgccgattggttatttctggcccgaaattttgggtggtggcaatggattgattgcacaccttggacaaaatttaccgacaaccagtgtggtggccggtctattcctattacggtttgttttttcaatgatttcatacggttcaggattacctggtgggatttttctaccgattttatcactaggagctttaatcggtgccctttatggactcataatggttcaacttggttggttagcaccagtttatgttcccaacttaattatttttgcgatgggtggttactttgccggaatcgggaaggcgccatttacggccattctactagtgaccgagatggtaggttcgctcgtgcacttgatgccattagcaattttatcgttggtggcctacatcgtcgttgacttaatggggggcgcgccaatttacgcatcattattgcaacgcgcacttggcaaaccacatcgtaagttagcaacattctctgatcgcttggaggtaccagtgtttgcgggcgcaccgttagaggatcgccaagtccgtgaagtggactggccaaagacatgtttgttaatcgcgattgttcgtggcgaatccgaactgattccgcatggtgatacgttgatccgtgctggtgacacgttgattgtgttaacggatcatcagctacgggcgacggtgcggcggcaaattgaagacgctgcccaagccttgcgaaatacggatgagaatctcgtgaaataatcgataaaaaagtggtgattaactactttttatgctaaagtattaaaagacagtgtagatagaaaggtagggaattaggttggaaaatcttatcctgaacttattattaatcgattcaatcttgattgtgatcgcagtcatgatgcaaccaagtaaacaacaggatgctttgagtgcgttatcaggtggttctggtgatttatttggcaagcaaaaggcccgtggtttcgaagctttcatgcagaaagtaaccgttgttttaggggctttattcttcgtctttgcattagctttagtgtacttatcatcacactaatacatgtgagacgggtcgaattctaataagaacgttgatgcggtctcctgttgaatggcaggagacctttttaaatgaattcaagcagtaaggactttgggggtgagcgcgtgtcttatcggttgccgcaaccgttttattttgacggtggttcagtcggggttgtgttgttacatgcttatacaggtagtgcgaatgatgtccgtatgatgggccgctttttggagaaaaatcagctggcggttagtgcaccacagtttgcagggcatgcaacggctgatccaaccgagattttaacgcgcggttctgtcgatgcatggtgggccgatacggtggctgcgattgagcagttatccgcggctaacaaacaaccgttatttgttttcggattgtcattaggcggattgtttgccatgcgggcattagaagaactaccacaagtttgtggtggtgggatttttagtgcgccagtactcgaaggaccgactgctaaattgacgccgctctttggccaatatgctaatcgaatcatgcagttaatgggcgtcccagctgcgcaacagacagcacgtttggcgactattaatcagcaattaccacaacaacttgcatcaattgatattttcagtcgacaagttgtggctgatttgaagcaaatcggagataaaccggtcttcatcggccaaggcggacaagatcaagttattgatccaacgcaagcccaagtcttacaccagcaattaacgcaacaaaacataacagttgattatcattggtatccacaagccggccacgtcattacggtcgatagtgcgcatcaccaattagaaacagatgtcctagaatttataaaccgttttaagaaatgagaaagaggtgttgatgtgacacaagttgaacagatgaaagcagcgattcttgcaatttttgaagcagatgcaacgcaacaattaaacgtatccgaaattagtgaacgaatcggcgttgccggttcacaagggttcaaagacctagtgaaagtattagcagaattagaaggggataagacattgaatatggacgatgccggtaagttcagattaccagccagcaaccgccttgttgaaggggtcttccatgctaacgatcgtggctttggcttcgtttcaatcgttgataaggaacctaatgatccagatatctttatcgccccacccaatacgaattttgcgatgaatggtgacacggttgaagtggccatcattaaagaagccgaagaaaacagccgccgcggtcctgaaggaaaagtggcgaaagtgattacgcgggggattgaagaaatcgtcggcgaatttatgccttattcagatatccaaaaagaaaaaacaggctggattggatacatccaaagtcatgccaaaaaattaagtaattaccgaatttatttaacggataatgggttacatccacaaaagggtgacatggtccaagttgacgttaccggttacccaagtgttgaggcgccaggtcaaatgctggggattgccaaacaagtacttggtaacaagaatgatcccggcgttgacgttttatcaatcgtgtatcaacatgatattaagacggacttcccagaagaagttcggcttcaatcagaagcgattccagatacggttttagaatctgataaactaggtcgtaaagatttaacggatcaagacgttgtgacaattgacggcgacgattctaaagattttgatgatgcagttaacgttaaaaagttggcaaacggcaactactacttaggggtccacattgctgacgtgagttactacgtcactgaaggttcaccattagacgttgaagccttagaacgtgggactagtacttatttaactgatcgcgtgattccaatgttgccattccgcttatcaaacgggatttgctcattaaatccagacgttgaacgccttgctttaacgtgtgaaatggaaatcaatgaacacggcgtggtagtggatcacaagattttcccaagtgtgattaagtcaacagcgcggatgacatacaaaaacgtcaataagatcttaacagatcaagatgctgacttacgggcgcaatacgaacggctcgtgccaatgtttgaaacgatgtcagaattacatgaaattctcttgaagaagcgtcataaccgtggtgcaattgatttcgaagaagacgaagctaagattatcgttgatgaaaatggcaaggccatcgacatcgaattacgccaacgcggtctttcagaacgcatgattgaatcatttatgttggctgctaatgaaacggttgcagaacattacagtactgctaatgcacctttcttataccggattcatgaaacaccagatgctgataagatgaagaatttctttgaatttatcacggcttatgggattcaagcacacggttcaagtaagaaagtgacgccaatgatgctccaagaagtcttgacgcaaattgaaggtcaacctgaacaaccgattattacaacgatgttattaagaagtatgcaacaagcacattattctgatgaatcccttggtcactttggtttgggtgcggaattctacacgcatttcacgtctccaatccgtcgttaccctgatttgatggttcatcgtttgattcatagttatgccacaaatgggatgacgattgaagaaaaagaaaaatgggcacctaagttacaaccaatcgcagaacaaacatcccttgaagaacgtcgctcaatcgatactgaacgggaagtcgttgatcttaagaaggctgaatacatgcttgataaggtcggtaatgaatacgacgctgtgattagttctgttaccagctttgggatgtttatcgcattaccaagcacggttgaaggcctcgtccacatctcacagatgaaagatgactactatagctttgttgaaagccaattagcccttgtcggtgaaagaacgcataagatgttccgcattggccaaccagtacgggtcaaggtcgcgaatgttgatttagatgcccactcagtggactttgaattattagccggtgaagaagtgccattggcttcggctgaaatcttaagcaagattgaagcacgaccaaaacgtccagcacgcccacgtgatcatgaaaaaggcggtcaacgtcgtggtgatcaaaagaaaaacaatcatccaagacgcccagctgcgaacaaggactcacaaaaacgtacttttaaaaagtaggtgattgaatggcaaagaaacatcctcaaaaaccagcaaatttaattgcacagaataaaaaagctggtcacgattataatattttggaaacattcgaagcaggcttagtgctcactggtaccgagattaaatcggtccgtaagggcaaaatcaacttacgtgatgggttcgcccgcgtccgtaaaggagaagcctatctcgaaaatgtccatatcagcccttatgaacaaggcaatcagtttaatcatgacccattgcgcaaccggaagctattgttgcacaagaaggaaattaccaagattggtgctttaacgaagaataaggggattacgattgtgccgttacgggtttatttgaaacacggctttgccaaagttttaatcggcgttggtgaagggaaacgggaatacgataagcgcgaaacactgaaacgaaaagaacaagatcgtgaaatggcccgcgcagttcggattaaaggttagtcctttaattaaaatctaagtataaagtcaaaaagctatcacaaaatttacttttgtggtagctttttctattggaagtatttggtttgtcggcggttacaagtgggtttttattacacaaaaattataaatgtcttcaaactgtaatataacgtcattaatctgcaatcttcttgcggggattgttgcgtataatcaagtctgagttatgaatggaggagtttaacaagatgcgatttagaaaactagcgttagctgttgttacctgtttagttgcaatggttacgatgggcacatctgttagtgctgccagtttgagcgaattacaagcccaagaaagcagtacccaaaaaagtattgatgatacaaattcgaagattcaagccactttaacgagcgtgaatgcgaagtatcaagaaattaatgccttaaaggaaaagattaaggataacgaaaaaaatatcgaacaagcacaaacgcttttgaaaaagcaacaagccactttagcaaaacgtaaaagctatgctaaggaacgcttgcaatcacttcaacgaacagccgatgaccgcaacgttgtcaacgcactattgtcagctgattctttgagtgatttcttcaaccgggcttacacattgacggttcttcaaagtgctgacaaccataatatggatgaattagcacagagttaccgtgatacacaagccattcaagataagttacaagctagcaagacagaacttgatgaacaacgaagcagtttggatcaacaatctgtcgaactggaacaacaagtggctggcttaaagaataatttaagtcaaagccaagcggatcttgcaaaaattgctaaagaaaaagcagaagaacaagcacgtgaagaagctgaagccaaagcggctgaagcagctaaaaaagcggccgacgaagcaacacaagcgccaattgcaccagttgtggacacaaatgcccagcaagccgatttagcaagcgctgctgatggcaaggccggacaagcgattcaagtgcaagcaacggcttattcaactgccgaacctggtttgagccattttggtgcaactggaattgatttaactaaaaacccaaattgtatcgccgttgatcctagtgtcattccattaggctcacttgttttggtacctggttacgggtatgcaattgctggtgacatgggtagcgcgattaaaggtcacattattgatgttcattttccaactgttgcggcatgtaagagttggggtcgtcgtcatattacaatcacaattattaagtaattttaaatacagccttttttgaggctgtattttttacttcgtggattgttttggtaaaataaataataaattatatttaataaaggttgtcagggcaactcataatgaacgttgttgatgattattagtgaaagttagttgaaatatataatttaatactatagactatttatattgctttaaatcgaagtacggttaagattagctgactaagtattatttagatcggctatcttagaacacggaagaattgaagtactgaatagtgtgagtatgaaacttatcgatggttaactattgatactgaaagtttcagcatgtaggaggaatagaaatggatacgagtaataacaccgatttactcggtagcacatcagcagattttatggaattcgcaggtttataccggtggttgattaacaaccttagcgaatcaatgagtcgtgaaagccaaaaatacggtttatctttcgaccaatttttagtgatgcacgagattcaaaatgcgaataatgaaacaactaacagtgcattggcagataagatgcaagtgagtcgttcagcgatttcacgtcaatgtcgttcattacgtaagatggcttttatcgcagaacaatctgatgaaaatgaccaacgcattcgtcgtgttcatttgacggaaaagggtttggaagtttatcgtcatctcttgttctattacgtagacttgtacaaagatttacaaaatgaaatcggccaagatactgttggcgcaacaatcgaccaaagcaaaaaaatctttggtcgcatggcatcaatgaacatggatcgcccagaagcaaaataaacgttaaaaaaggccgcaacctgttttcaattaaataacaagtgtttttcaaaactttttatttaattgacgatactgcttatcactaatcagctcgcttttgacaactttattagtataccaacttgcaacccgtgatgcaaggattttctgtaaataaataataattatcttataacaataaaaaaaggcccttagctatactaggggccttcgtttttctactattaaacgtagaggtttttaacttgtttttgtaattccggatgtgctaagaactcatcatagttcgtttcagcacgttcgacaacaccgttcgctgatacttcaatgatatgatctgcaattgtttgaataaactgatgatcatgcgatgtaaagactaaagcacccttgaaatcgatcaaagcatcattcaatgaagtaattgattccaagtccaaatggttggttggatcatctaatagtaaagtattcgatttttgcaacataatcttcgatagaatacaacgcactttttcgccaccagaaaggacattgatttcttttgtgacttcatctccagagaaaagcatcttgcctaagaaaccacgtaagaaagtattgtcatcttcacccttagcggcaaattgacgtaaccagtctaagatgatgagttgatcatcattgaaggctgagttcgtatctcttggtaagtatgattgttgacttgtcacaccccaggtaactgtcccagtatctggctgcacttcacctgctaagatttgcattaagacagctgtcgcaacgtcatttcgtgaaacgattgctgctttttcgtctggcttaactgaaaagctgatgttatctaacactttaacaccgtcgattgtttttgaaacattctcaacccgtaaaagatcattccccaattcacgttcgaaatcgaacttaatgaatgggtattgacgtgaagagggttggatatcttctaatgtaatcttttctaattgtttcttacgagaagtggcttgttttgattttgaagcattggcactaaaacgcgcgataaaatcttgtaattctttgatttgttcttcttttttagcgttaacgtttgattgtaacttagcggctaacttacttgattctaaccagaagtcgtagttcccaacgaatgtcttgatgcgaccgaagtccacatcacacatcattgtacagacttggtttaagaagtaacggtcatgggaaacaacaatcacgatgttcgggaagtctgctaagaaatcttctaaccattcaactgaggcactgtccaacccattcgttggttcatctaataataggatatcaggtttgccaaagagcgcttgaccaagtaaaaccttaatcttttgcccttccatcaattcactcatcttcacatggtgtaaagattcatcaatccctaaggcttgaagtaattgagcagcttctgattcagcatcccaaccattcatttcagcgaattcagcttctaaatcagcagctttcatcccatcttcttcagtgaaatcagctttagcatatagggcatccttagcttgcatcacttcatacaacttcttatgaccttgaatcacagtctctaacacttcaaattcttcaaaagcgtagtgatcttggttcaaactcgacatccgttcattagggcccattgagatatggcctgatgatggttgtaatttaccttctaataattttagaaaagttgacttacctgcaccattggcaccgatcacgccataacaattcccaggtgtaaacttcaaattaacgtcttcatataacttacgcccagaaagcgttaagctcatttcactaacagttatcacttgattccctcacttttctttcatgactctaaaaagccaaccgtttcatgtgaaacggctggctttctaccattgacaatatatgcttaactctaacatatctaatgactagttatcaaccaggctatttgaccttagcaatcttaccttgttgaatatagacacttagaatcccgatatcggctgggttgaccccaccaatccgactggcttgcgcaagtgtttcgggttgaattttttgtaatttttgacgaccttctgttgcaaggccttcaattgcatcgtaatcgatattggctggaatctttttagcttccattcgttttaacttcgcaattttagctttttccttatcgatgtaacccgcgtatttgatttgaatttcaacttgttccacaacgcggttatcaatgccttcgactgctggaataaattggattaaatcagcatactttacttctggccgttttaagaagtcgctggctaaaacaccatctttaagtggtgtctcacccttagccgctaaaaaggcttggatttctggggttggtttcaagcgaatggttgctaaacgtgctaattcagcttcaacggctgcttttttcacttcatagctgtcaaagcgatcatcattgattaagcctaatgcatgacccttttctgttaagcgtaaatccgcattatcgtgacgaagcatcaaacggtattccgcacgtgaggttaatagccgataaggttccttcgtcccctttgtgaccaagtcatcgattaagaccccgatgtaagcttcactgcggtccaagatgaatgggtcgcggcccgtttgcttcagagcagcgttgatgccggccatcaagccttgaccagccgcttcttcatatcctgaagtgccgttcatttgaccggctgtataaagattttcaaccactttggtttcaagggttggttttagttgccatggttcaacgacatcatattcaatcgcataaccaggacgcatcatttgggcattttctaagccttcaatcgaatgaatcattttgtgttggatttcttctggcattgaggttgagaaatcaccgacgtaatattcttctgtttcgcggccttctggctccaagaaaatttggtgccgaggcttatccgcgaagcggacgattttatcttcaattgaagggcaataacgtggacccaccccttcaattacgccggtaaacattggggcgcggtcgagattgtcgcgaatcacttgatgcgtcgtatcattcgtgtatgtcatccaacaagaaagttggtctttcaaataagcactatcaggtgtttcgaaactaaagtggtttggttccttatcccctggttgttcttccgtctttgaaaagtcgatcgtggtgccgtccacgcgtggtggggtccccgttttaaaacgcgtgaggacaaatccgttgtcttccaaactttcagaaagtttaatagaaggaattgaattattcggaccagatgaataggttaattcgccgataataatcttaccccgagaagctgtcccagccgttaagatcacactatcagcgctgtaacgggcaccagtgttagtgacaatccctttgcagacaccgtcttcaacgatcaatgattcagcaatcccttgacgaagtgttaagtgctccgtcgtttcgatagtccgtttcattgtccggtgataagcgtgcttgtcagcttgggcgcgtaacgcgcggacagctggccctttacctgtattcaacatccgcatttgaatgtatgttttatcaatattgcggcccatttgaccacccaaggcgtcaatttcacggacgacaatccctttagcaggaccacccaatgatgggttacatggcataaaagccaccatgtctaagttaatcgttaatagtaatgtttcgcggcccattcgtgcagcagctaaagccgcttcagaacctgcatggccggcaccaacaacaatcacgtcgtagtgcgctgcgtcatattctcgcatattttgttctcctttaatatggttcaagacctatttacctaaacagaattggctaaagagttccgtaatcaattcatctggtgctgaatccccggtaatctcaccgagcttatcccaacagttggtcatatcaatttgcacaaggtcaactggcatcccagctgcaattccactgatgacttcatctaatgattgttgtgcttggtttaatagaccaatttggcgggcattagtaatcatgaccgtactttgactattttcaatcccaccgaagaagagtttggcgatttgggcttccaaatcggtcaccccttcgcttgttaaaattgaagtttgaattacttcatccgcattcaccaatgtttggagttcatttaagtctaacaagttcggtaaatcggttttatttaaaataatgatccgtttcttatcagtggtggccgtgattaactcgcgatcttcaaccgttagtggttcactttgatttaaaactaataaaatcaggtcagccttggtaattgctgcgcgacttctttcgaccccaatcttttctaccttatcttcggtatcatgaattcctgccgtatcaacaagcttcagcggtaccccacggacgttgacatattcttccaaaacatcacgcgtcgtcccggcaacatccgtcacaatcgccttatcttcatgtaataggtgattcaacaaacttgatttaccaacattgggccgtccgacaatggccgttgctaggccttcacgtaagacttttccttgttgtgccgtttgaagtagttcaccaatccgcgctttcacaagttcggctttttcaagtagaatccgcgtcgtcatttcatcggtatcatattcgggatagtcaatgttgacttcaacttgcgccaatacttctaagatttcttggcgtaaattcttaatcaggtgcgttaaactcccatctaattgatcaacagcaacttgcatcgcccgatcagtcttagcccgaatcagatccatcacagattcagcttgggttaaatcaatccgcccatttaaaaaggctcgtttcgtgaattcacccggttcggccattcgtgcaccatagctcattaataattgtaagatgcggttcgttgcgacaattccgccatgacaattaatctcaatcacatcttcgcgggtaaacgttttgggtgcgcgcatgacagacaccatgacttcatcgactactgcgtcggttttaggatcgataatgtgcccataattaatggtatggctcgccacttgatcaagatctttgccgcgataaacgcgtttaataatggctaaactctcatcccctgaaagacgcacaattgaaattgccccctcaccaggtggtgttgaaatcgccgtaatcgtatcaaattctgtgactgtcgttggcattttaaatgcttcctttccgaaatagctgcataaaaaaagcgcttagcgtccacccctcccgtcattgcgtaaggggtggacaaagcactttcactactttatcgatatttaattagtttcattatacacgatttttttagagcgtcaattcacaacacctaaaatgtgcgcgctaattccaccacaattgaccggcgatcgccttggccttctgaatgagtttgaacatggtgattagttgctaaatgcccatgcacaattttgcgttcaaaagccggcattggttctaaaaagactggtttgccggtcgcaacgacttcacgggctgctttatcggcaaggtggctgacaatcgctgctcttcgctgccgataatcaccaacttctaggataatggtttgcttgcccttcatatgatgatcaaagtaagtctgcgctaaatattggagcgcattaattgtcttaccatgcttaccaatcaacaagccttctttatcggtcttcaaatgataagtcgtactccgatggtcgtgagttacatgaatgctgaccggtgtgccaatttgagccgtgatggcttccaaataggcgcttaactcagcttccgtttccacaccacttttccgcttttgcggcgtactagttaaattgtctgttggcgttggttcaactagctcttgaactggggctggggcgctttgtttaacttggcttggttgttcatttggcgttagccggacaactgctaagcggcgaccaaaaccgagaaacccttttttgccggcttccaatacatcaacggacacttcctcacgcgttagatgcatagcttgcaacccttcatttaccgctgcttgaatatcgctaccttcatatgttggcatttcaaaacctccgatcaatttggtcactccaactagtgtgagcgcccgattctcgtttattataccatgatataccaatttaaaaatagcatgtcattatctgagatagtccgccgtcaaagctaggaattgttgtacatctttagcgatgctatccgcggcagcttgccagaaatccggttgggttaaatcaaccccaagatgtttttgcgctaatgcttcagtcgacatattggccgtatcacgtaatagtgcgatatagtccgcttcaaaatcaggcattgtctgtgccttggcataaatccccatcgaaaaaagatagccaaacgtataagggaagttataaaacggcacgtcatcgaagaagaaatgctgtttgtccgcccagaatagcggatcataatcagtcaacgcatccgcataggcttctttttgagcggctagcatgagtgcttttaaatcagctgttgtttgcaggccattttggcgcgctgtataaaaatgtcgctcgaataaaaaccgtgcgtgaatattcataaacatatcaattgcgttagtaattttctgatccaataaattaatcttcgctgctgggctttgcgctgctttaacagtcgcatcactgacgattagttcagcaaaagtggaagctgtttccgcgacgttcatcgcatagtcttgtcgccaacttggtaaatcattaatcatcattgtatggaacccatgccctaattcatgtgccaaagttgcaacaccattgggggtgccatcaaatgtcataaaaatccgaaaatcatccgtttcaggtaaatcagtcatataaccacctggttgtttgcctggccgatcttcagcttcaatccaacgcttttcaaacgcggtttgtgccaccgaagccatcttgggactgaacgctttaaagttctgcatgataaaatccgctgcttcatcataagaataacgctgcggttgaaaatcacctacaaccactggtgcccaggtatcataccaagcaagctgttctttgcccattaacgctgccttccgatttagaaaatcgacaagcggcgctttattttgactaacgatcgaccacatcgcttctaacgttgcgggttgcatgcgactcgttgccaatggctttttcaaaaagtccgttgtgccatgtgcttgataatccgttaggcggaagccagccaaatgatttaacgtatccgttaataatggtgaataccgatcccaagtctggtaccaattttgaaagacgcgttggcgtaccttgggatctggatcagattcaaatttattctgcgcttgtcccgccgataaagtcgtctcaccatcggggacttgaatttcagcaaccaatgagtcgtaatgatcactccatccagttaaaccatctaacgcgaactggttaattagtttttccgtcgcttcatccaaaagttcagcaccattcgtccgtttttcggttagattaaactgaatcgcttgtaaggcaggtgtcgatacaacggttttaaaatctgcgtctgacattgcgaccaatttttttgtgagtgcgacatcaatctgattcgcatcattttcaagcgcattaatccgccccatcatcggtgcaacttgcggattgcgttcatccgttgattgaatcatattcacgaaactccccgtttgcttgagacccgcttcaatcgcttgtaactgttcagtgatttgcgttagcgttgcaaatgttggctgatctgtcgcaaacgtccagttctggaccgcttctaataagggcgtcatttgtgcagtcaaatccgccaatcgttgcgtcaacgctggtgaatcaatccccccggcaaaaatcggttctaaatcccattgttctgaataggtcatctctttgtcctccacttttaaacgattgcacttattatagcgaaatttcgcgcaaagcgcgattaattcaaccagatccactagacattttgataatatctgttaaattaggaatgtaagcagatacatagctgctagaaaggcgatgtttatgatgacgattgaacaagtacccgctaatacaatcgcagatttaaaaacactgttaaaaacgacccaagtgcccgataaaattatggcaatgggacccgaactgatccaatacttaacccatattaaggcgagtcaattatcagacaccgaccatcttgggttcgatttagggagtgccggcattttaacgttaatcgaacaagtcaatacagcctttttcgatcacttccatatgtttgacgatgctgcaccgattgaaccaaagttaacgcgtaaaattctagtgctttatcatctaaaaccgattgatgatcagcacttcctccttcatttgaaacaattagactattaaacagcaaaaaatcgtaaccaaatcggttacgatttttttattcttaaagatttttgaatgagagtagttcaacctcccttcgtggtgtcgtaaacaaccccaagttttagaagagtatcaaatcaatgagtagttcaacgctgtttagtagtgaaacctaactcatcatgttttagaagagtatcaaatcaatgagtagttcaacctgttactttaatgccgacagacgcgactagttttagaagagtatcaaatcaatgagtagttcaactcagcgcgggcaaggtttaccagtcaagtagttttagaagagtatcaaatcaatgagtagttcaaccggtgtatgggcagattgtttgggcaatcagttttagaagagtatcaaatcaatgagtagttcaaccgttttctactgttgcgtattgaaattgtggttttagaagagtatcaaatcaatgagtagttcaactataacacgtgtttagagccattgggttcagttttagaagagtatcaaatcaatgagtagttcaactataagtatatcatattcagcactttactggttttagaagagtatcaaatcaatgagtagttcaacatattgccgaaggtgaagcaattccattgggttttagaagagtatcaaatcaatgagtagttcaacctcatcgctaaataatgagtcatcgtcgttgttttagaagagtatcaaatcaatgagtagttcaacacgcagttttcgcgccatttcaaggggatagttttagaagagtatcaaatcaatgagtagttcaacatcaattgaacgatataaagcgttgcttacgttttagaagagtatcaaatcaatgagtagttcaactttcaatcttgcgttgttcagcaatactctgttttagaagagtatcaaatcaatgagtagttcaacggattaactcattttgttttcttgcgtccggttttagaagagtatcaaatcaatgagtagttcaacattacaacgaatttaacaagcgaggaattagttttagaagagtatcaaatcaatgagtagttcaaccagttatgattattagttaaaatagagtatgttttagaagagtatcaaatcaatgagtagttcaactcgattccgatgttaggttttggctgtcaagttttagaagagtatcaaatcaatgagtagttcaacttgaaatcttgcaccgctcttataccgccagttttagaagagtatcaaatcaatgagtagttcaacggaagtaacgacgatttgaagttgttaatagttttagaagagtatcaaatcaatgagtagttcaacacgattgcaatgaagacaatctggagatgggttttagaagagtatcaaatcaatgagtagttcaactgagcaagatggtggctgccctgtttaatggttttagaagagtatcaaatcaatgagtagttcaacacttgcgaaggctaatggcgagtcaaaagagttttagaagagtatcaaatcaatgagtagttcaaccacttaatccaatcgccaccagttgcgctagttttagaagagtatcaaatcaatgagtagttcaacaaggcaaaaataaaagactcagtctcgaaggttttagaagagtatcaaatcaatgagtagttcaacggactagcccaaataggtatagttacacctgttttagaagagtatcaaatcaatgagtagttcaaccaacgactagaaaaatagctacgtttaatagttttagaagagtatcaaatcaatgagtagttcaacttgaagtcgttgtcgctaaatgtttgctgagttttagaagagtatcaaatcaatgagtagttcaacgtcatacctagtttacctaaatcatcaccagttttagaagagtatcaaatcaatgagtagttcaactgtagacgtattagaaacgtcccaaggtcagttttagaagagtatcaaatcaatgagtagttcaacataaatcacgttggctcattccacggttaagttttagaagagtatcaaatcaatgagtagttcaactacacgccttaaaaattaattagttgcaaagttttagaagagtatcaaatcaatgagtagttcaacgtagctacaagaaagagcctgattggcaatgttttagaagagtatcaaatcaatgagtagttcaacgggtcattcctgacttacgtaataggcaacgttttagaagagtatcaaatcaatgagtagttcaacagcttatcacctgctgtggtggtggcattggttttagaagagtatcaaatcaatgagtagttcaaccggtattgtggctgaccaaatggctcaacggttttagaagagtatcaaatcaatgagtaatattaacctatttcccgtgcgaatctattgaaaaagatcacgttgtccgcgtggtcttttttcatgcattcaagcattgaaaacagttctcaattagcatagaattaagagcgtataataattgctagaatgcgattcttggagggtcatctatgtctaaattagagattatcgatttgcacgtcggcatcgacggtaaggaaattttaaaaggtgttaacctggaaatgaacacgggtgaaattcacgcgatcatgggacctaacgggactgggaagtcgacgctttcggaaacgattatgggcaatcccaagtatgaggtactacaaggtcagatcaaactagatggccaaaatattttagaaatgccggttgatgaacgcgcccgtgcggggttatttttggcgatgcaatatcctgctgaaattcaaggggtaacgaacgctgaattcatgcgtgcggcgattaatgcacgtcgggctgaagatgatcagatttcagtgatggctttcttgaaaaaattagatcaacggatggcattcttggatatgacggaagaaatgtcagaacgttacttaaacgaaggattttctgggggtgaaaagaaacggaatgaaattctgcaattgatgatgattgaacccaaattcgccatcctagacgaaattgattccggacttgatattgatgccttgcaagtcgtttcaaaaggcgtgaacgaaatgcgcggggctgattttggctcattaatcatcacacattatcaacggctcttaaactacatcgtgccagattatgtgcacatcatgatgggtggcaaaatcgtcacgactggtgatgcgtcacttgcaaaacgtttggaagacgaaggttatgtcgggattcgtgacgaattaggcttggatatcaaactgactgacgacgaaagtaaatagggggcgattctgatgaagaaaacattagccatcacgcctgaacaaatcgcgtcattctcacaattgcatcaagaaccggcctggtttgctgaaatgcgtcaagcagcgtttgcgcaaattgagcaactcgaactgcctatctttgaaaaaattaactataaacattggccagtgatggcagcaaatgcgccaacagccgttaaatccgatttgagtttaatgccatctgcggcagcgaatctttcagctgatcaaccgtacgcagtacagattggtcagacaactgccaagttaaatttaccggcagaattggcagaacaaggtgtcatttttaccgatattttcaccgcgttacaagaacatcctgatttggtacaacaatactacatgcaagtcacagtgaaaccgaacgaggatcgcttaacggcttttcacacagctttgatgaacagtgggctcttcttgtatgtgccgaaaaatgtggtgattaagcaacccattacggcttattatgtacaggacagcactcaacccgctgattttattcatcacgtcctcgtagtagccgaacaaaacagtgaatttagttatcttgaaaatctccaaacagcgggtgaccacaagaacttagcaaatgttgtcgtggaagtgattgctaaagataacagtcacgttcatttttcagcggttgatgcctttggaaaatccgtgacgacttacttgaatcgccggggccacttgatgcgcgatgcgcggattgattgggcattgggatcaatgaatgatggcaatatcatcggtgactttgattctgatttagtgggtgctggatcacatgctgaaacgaaagtagtcgccatctcaactggtaaacagattcaagggattgatacgcgtgtgacgaatattgggccgcgttcaattgggcacatcttgcaacatggcgtcattttagaagatgcgacgttaacgtttaacgggatcgggcatattttaaaaggggctaagggtgccgatgcccaacaagaaaatcgcgtcttgatgttatcgcggacagcacgcggggatgcgaacccactcttattaattgatgaaaatgacgtgcaagctggccatgctgccagtgtcgggcgcgttgatgaacaacaaatgtattatttaatgagtcgcggtctttcaaaagaagtcgcgcaacgacttgtaattcgtggtttcttaggcgctgttctaagtgaaattccggataaaaacgtgcgccaacaattaacggacacgattgaaaggaagttaatcgatggtcaaccagttaaatgattatcggtgcgactttccgattttagaccaaatcgtcaatgatgaaccacttgtttatttagacaatgcggcgaccacccaaaaaccacaagccgtgattgaccggttggtggcttattaccaaaatgacaatgcgaacgtgcatcgtggtgtgcatactttagctgaacgagcaaccgcccagtatgaagccgcgcgcacgaaggtccaaaccttcatccatgccgctgcgagtgccgaagtgattttcacaaaagggacgacgcaaagtttgaactgggttgcaggcagtttcggcccaaccgtggttgaagccggcgatgaaatcgtgattagtgtgatggaacatcatagtaatctcgtgccgtggcaacaactggcgcagaaaacgggcgcgaaattgcgttacatcgacttattaccggatgggcaactcgatttagagtcagcacgccaggtgattgggcctaagacgaaaattgttagtttggcgcatgcttccaacgtacttggggttgtcaatccgattaaaacaattgcggctttagtccatgcacaaggcggttacatggtggtcgatggtgcacaagccgtgccgcacatgatggttgatgtgcaggcacttgatgcggacttttacgccttttcagggcataagatgcttggaccaaccggcattggtgtgctttatggcaagcaagcattacttgaacagatgccacccgtggaatatggcggcgagatgatcgactttgtgggcttacaatcttcaacgtttaaagaattaccgtggcgtcttgaaggtggaacgccaaacattgcgggggcaattggcttaggggccgccattgattatttaacgcaaattgggatggatcatatccaagcccatgaacaagcgctagtcacaatggctttaccgcagctccaagcaatcgacggcctcacgatttatggcccacaagatgccgcccaacgcaccggtgtgattgcctttaatctcgacaatttacatccacatgatttagcgaccgccctcgatatggaaggcgttgccgtacgtgctggtcatcactgcgcacaaccgttgatgcaatggttgaacgttgccgcaaccgcgcgcgctagtttttacctctacaataccgaagcggacgtgaaaacgttcgtgaccgccattcaagcagcaaaggagtttttccaaaatggcactctctaaattagataacttatatcggcaggtcattcttgaccattcgcaacatccgcatcatcatggtcacttgacgactgccgatcatgaaattgaattacgcaaccccacctgtggcgatgtgttacaacttgaactggtgctcgaagacgggcagattagtcagattgctttttcaggggaaggctgtacgattagccaggcttctgccagcatgatgaccgatgccgtgatgcataagacaccggcgcaagcggaggcgatgatcgaacgcttttcggatatgatgattggtgatcgtgacgaagactggtcattgttagaagatgccgcgattttacaaggggtgcaacaattccctgcgcggattaaatgcgcgactttagcttggaaggcgctccacaaagccttaaatagcgatgaccgacgtgcaacaaccggtcaaatgatgaaccacgcagaaacggaggaaactaacgaatgacagaagagacaacgatgccccaatttgaagagtacgactacggctttagcgacgatgtagagcccgtcttttcaactgggcgcggtttaacggaagacgttgtgcgcgccatctcgcgtgagaaaaaggaaccacaatggatgttagatttccgcttaaaatcatttcacgcttatgaaaaaatgccaatgccagatttcggaccggacttatccgatcttgatttagaacacatgttgtattatcaaaaggcaacggacaagcaataccgcgattgggaagatgttcccgacaaaatcaaagaaacgtttgatcgcttaggtgtgcctgaagccgaacgtaagtatttagcaggttccagtgcgcaatatgaatcagaagtggtttatcacaacatgcgtgaagaattcgaaaaacttgggatcatttttaccgatatggataccggtttacgcgaataccctgaaattgtgaaggaatacttcagtacgttggtcaaaccaactgataataaattctcagcgcttaactcggccgtttggtcaggtggcacgttcatctacgttccaaaaggcgtgcggacggatattccaatccaatcgtacttccggattaacgccgaaaattcaggtcaattcgaacggacattgattattgtcgatgaaggcgccagcgtgaactacgttgaaggctgtactgcaccaagctattcaagtgatagcttgcacgcagcggtcgttgaagtctttgtgaaacgggatggctattgccgttacacgaccattcaaaactggtcaaagaacgtttatagcttggaaactaaacgggcccaagccatggaaaatgcgacaatggaatgggtcgacgggaatctcggttcaaaaatgaccatgaagtacccaagtgtctacctcgatggtgaaggtgcacgggggacaatgctctcaatcgccgtcgccggcgaaggcgttgaccaagacagtggcgcgcggatgattcacgccgcaccgaatacgtcatcctcaatcgtttcaaaatcgattgccaaagatggcggggccgttgattaccgcgggactgttcgttttgaacgcgacagtgacggttcgtttgcccatgtcgaatgtgatacgattattatggatgaccgctccagctctgatacgattccgtacaacacaattctaaacggcaacgtctcaatggaacatgaagccaaagtctctaaaatttctgaagaacaactctattatctgatgagccgtggcatctcggaagccaaagcaaccgaaatgatcatcatgggcttcgtcgaaccattcaccaaggaactcccaatggaatacgcggtggaattaaatcgactgattagttatgaaatggaaggcagtgtggggtaattgaattgcataagctagaaatgcttatttgaaggcgtttctggctttttttgtttgtgcatgtagaaagtaacaccaaaagtaacaccatttggatagaaatttttagagagatttaactagtatgcagtattaaatggtatgataaaataaaaattataggaggtattgaaaagtgaatagagatgcagttttaaaagctttaaacaataatgaatttgatggtgtgaatcattcttaccaacctgttgatggatatggaaaacatgaaacatatcaaactaaaatgaaagttttaggtagtgaaatcgaggttacgactatttatagaaataagtttttcgatggtaaggaaaatgaatgggaaactgacgaaaaagtagaaatcttaacaggatctgatgcgattgattttattgaaagaagaccctattacttcagccaagtacgacctgatttattttaatttgtattttcgataggaaaagattctttgggagagaaggtgtgtttttgcattgttaaacctaaataaaataatttggattgaaggtagattgtaaaattaatccgacgctgttcggacaaaaaagatcagcttccctgtcgcggccttttttgagttcaccttctttttttggtatgatagaatccgtgctatgaaaaaggataagttgaaaagagccattttaactgttgaaacagtgaggagtaatataacgtgaatcagaaaataacggatggcgtctacctgaatattttacaaactaaccaatttaaaacaattagattaaccgttcaattaattgcgcccgtcacagctgatgggatgacccgacgctcattattagcgagcgttctaggtgctagtagccaagcctatcgtgaccaagtcgcaattgcgaatgaattacaagccatgtatggtgccggctttaatatgaatgcctatcgacaaggaaacttggcgatttttagcatctcaatgcgaattgtgagcccccaatatctacgggatacaatcgacttgcaagagcaagcgattgcgtttatcgggcaattattattgcatccagatgtggttgatggccagttcaatccggtcatttttaaccgtgaaaaagagaacttagtgcgttacatcgaaagtgttgccgatgataagcaatcatacgcggcggttgaattacgcaaactctattttaaagatgcgacgcaacaaattcccaattatggggatgcagctgatttagcaaccatcacaccggatgaactatatgcgtattatcaatcgatgattgcaaacgatcgggtccaaatgacgtttgtcggtaatatcgacgaagccaaaacggtcgcggatttggcacaattgccatttgcaccgcgtaatgttgaactgccaacgattttttatcaacaatcattatatccacaagtgcaaactaaaacagaagtacaaacggtgcaacaaggcaagttaaacatggcctatcaaatgccagcttatttctatcaagctgattattatgccacaatggtgatgaacgccttattcggtggcacaccgctgtcgttactttttaccaatgtgcgtgaaaaagcgagtctagcctactatgcctcaagtgcaatcgatgcttttcggggtgtcattacggtacagactgggattgaaagtcgccaaaaagatcgcgtcttagagattatcgaagcccaacgtcaacggattatcgcgggtgactttgaacaggcggtctttgaacaaactaagttggccttgattaatcaatttaaatcgagtctcgatagtgcggcctatttggggcaacaacaatttaatcgtttgtttgtgcctgaaactgaaattgatgcagagcgatttacacaggccatcttggcggtttctaaacaagcggttcaagaacaagccgcaaagatgcaattgcaagccatttacttcctgaaaggggtcgatacagatgaagcttagacaaaatccccgcttaggtgaaaccctctatgaaactgaattagagaatggcttgaccgttaaaatataccctaagagcggttatcataagacatatgcaatcttaacgacgaattatggttcaatcgataagacgtttatcccagctggggaaacggattatgtgacagtgccagacgggattgcgcattttctggaacataaattatttgagaaaaaagattacgatgcgtttgaaaagtttggtcgctacggggcaagctcaaatgcgtttacgagttttacgcgaacgagttatttattttcaacaaccagtcacttgcaagaaaatttggatattctacttgattttgtgcaggaaccttatttttcaactgagacggtcgaaaaagaaaagggcatcattggccaagaaatccagatgtataatgatgaaccggattggcgcttattctatacagtgattggcaatctctatccgagtcatccagtgcggacggacattgctgggacggtggatagtattgcgcaaattacaccagaagcgctctatcaagcacatgcaacgttctatcagcctagtaatatgaacctctttatcgttgggcaaattgatgatccggatgaagtggttgattggttgaacgccaatcaagcggcaaaaacatttgcccaaccaacagaaattgtacgttcattgcctgaagaagctgaagatggtcatgatatcattccgtatcggtcacttgaaatgccaattacgcgtagcaagagcatggtcgggattaaaggtttaacggattacggaacaggtgagttagcacttgaaacaaagttgaagatgaacttgttacttgaattgctatttggtgattcatcaacgcaagtgcaaaagttgtacgatgatggcacacttgatgatagttttggttacgaatttgccattcaacggtcatttaattttgtgacccttggtggcgatgcggacaatgcccaagaattatcggatgcaattattaatatcttagaacatgccacggaaagtcctgacttttcagaggataacttggcgttggttaaaagagccgcaattggtgaatacttgcaagcgttcaattcgctagaagccattgcgaaccaatatagtgatgaattctttaccgaaatcagtccatttgatgtcttaggtttgatcgaacaagtgactttagcggacttgcaacagatggcaaccgattatttcaaaattgaaacgatgacagtctgccacatcttaccggagggagcaaaccatgcctaaatcagccttaattatcggtgcatccggtgatattgggatgacggttgcgactgaaatggcggcggacggttggtcgctttatttacactatcatcaaaatcagacgcgggttacgacgctgcaaaagcaattgttgcaagactacccaaaacaggatttttttgcgcttcaagctgatttaacccaagaggacgctgttggaaaattgacaggccagctttttcaagtcgatgcggtcatttatacagcaggtgcgacgacgtatggcttattgccagaggtcagtgcaacggcactcgatcacttatggcaggtgcacgttaaagcaccaatgctattgatgcagcagctgcaagcgaaactagcgcaaagtccattaggacgcgtcgttttaattggttcaatctatggtggccggggcagtgcaatggaagtgccatatagtacagttaaaggcgcacaatccgcctttgtgaacgcctatgcacaggaagtggcatcgcttggaatcacaattaatgtggttgcaccaggcgcagttgatacgaaaatgaacaatcagttcacaacagcagaacgggctgctgttgtagcggagatcccggccggtgcttttgcaaccccagcacagattgcctattgggtattgagtttaatggcacctgcagccgattatatgacgggacagacattgtacgttaatggtggttggttaaaataaagaaatcttaataatgcacatacgtaccaatatgctataattatggataatgatactgggataatagtgggtggaattgattatgaatgaaattggtcaaaaattacgtgaagcacgaattgaaaagggctacacactcgatgatttacaacaaatcacaaaaatccaaaaacgatatttaatcgccattgaagagggcaattttgatgccttgcctggcagtttttacgtgcgggcatttatcaagcaatacgcccaaacagtgggcttagataatgatgcattgttggcagaataccaagatgctgtaccagatacgaaaccagaagaatatgttgaaaaatccgttgaaaatcaaacccgattgacgcgcgaaacaacagattctaaatggtcgaaatggcgcaaccttgtcccacaaattacgattgtggcaattgtggtcatcattattggggtggtctatgggattgcgctcagcaaccgtggtaaagaccgcgaaacgttaaacgaaacaagctcatcggttacggtttctggggataaaccagatcctaagaaggataacagtagtgaagacaagtctgctgaaagcagtaagaaagccgcttctgaaagtaaggcacaagaagctagcaagaaagctgctgaagataaggctaagaagcaagaattaacggcgaagatgaccagcattaatgggtcacaacaagcttttgaaattaagaacttgccagctaaagccaaccaaattacgttctcagctgataaatcagctgcttgggtcagcttaacggccaatggccaacaaatttggcaaggttctgtcgcagttggtgccgaacaaactgctgaattacctgaaggcgttacgcaatttagtattcaaactgggaatgcacctgcaacgaagatgaagattaatggcaccgatattaaccttagtccaaataacgaagcaacgtttgtgcggacgattaatttcacagcaacattggctaaataaaggacattaaggagtcttcaacatgaatttaccaaataaattaacgatgtttcggattattttgattccgatttttactttgattttagtattggatgtgcctgcgacagccattatggtcgctgggacaagtattccagtcagtgcgattattgcaacagtgattttcattgtagcctctttgacggacttactagacggcaagattgcccgatcacaacatttggtgaccaacttcggtaagtttgctgatccattggctgataaattattagtgatgacagcatttatcttcttagtggcgctagatcaagcgccagcatgggtggttgcgattattatttggcgtgaattagccgttactggcctacgtttattattaagcgaaggtggcgaagtgatggccgcagctatgccaggtaagattaagacgacgacgcagatgttagcgattattctattgctactcaacaacgtcttctttaacaatatcggcattccaatggcacagatcatgttatacgtttgcttgttctttacagtttattcgggtaccgattatttcatcaagaacagaggcgtctttaaagactcattttctaaataaacttaaactggcggggaatcccacgccagtttttttaacccaaaaagcacgaaaaaaacgcggtgattcgggtatagtagagtagcttaaaaaatatatagaacgtttgttcgatttttacttgcttttatttcgtgaaatcggtaaactaagagagtactgaaaaggactcttttgaggagggcacttaattggctaaagatgaaagacaagcagccttagatgctgcattaaagaaaattgaaaagaattttggtaagggctcaatcatgcgaatgggtgaaaaggttgatacacaagtctcaactgtttcatctggttcccttgcattggatgaagcgctcggtgtaggtgggtatccacgtggccgaatcgttgaaatttatggtcctgaaagttcaggtaaaacaaccgttgccttacatgctgttgccgaagtgcaaaagcaaggtgggactgctgcttatatcgatgctgaaaatgcaatggatcctaagtatgcaactgccctcggggttaatattgacgatttactcttgtcacaaccagatactggggaacaaggcttagaaatcgccgatgccttagtttcaagtggggctgttgatattttagttgtcgattcagtcgcagccttagtgcctcgtgctgaaatcgaaggcgaaatgggtgacgcgcatgttgggttacaagcccgcttgatgtcacaagccttacggaaattatcaggaacaatcaataaaacaaagacgattgcgttattcattaaccaaatccgtgaaaaagtcggcgtgatgttcgggaaccccgaagtcacacctggtggtcgcgcattgaaattctattcaaccgttcggcttgaagtccggcgtgctgaaaccatcaagaatgggaccgatatgatcgggaaccgtgcgcggattaaagtggttaagaataaggtggcaccaccatttaaagtggctgaagtcgacattatgtatggtcaagggatctcacaaacgggtgaactggtcgacatggcggtcgaaaaggacattattaataagagtgggtcatggtattcctatggggatgaacgcattggtcaaggacgtgagaacgcgaagaattacttggctgatcatccagaagttcaagatgaagtccggcttaaagttcgggaagcatatggtatttcggatgtcccagtagatgaaagcgatgaaacacaactcgacgtctttacggatgacgattcaaacgaataagaatcattaagctgaggcaaaagttattttgcttcagcttttttgattgcttaaccgaattattctgatggtcgatttgattgactgaactcgaaaacggttgcaatgccgatagtttaagttgacaggcggtttatgaaactataaaataactatgtgttgaaaaactaaacataataacatctttaaaaatttgcagtgaaagttgcaattcaaaatttttgatgatgcggaggtgaaacaatgaacttagcttttccattaatcctcgcagtcatcatgttaatcgttggtttactagttggttccgttctacaaaagaaggcgcacgaacgtgaaattgatggtgcaaataagactgccacaggaataatcgcagcagctgaaaaagaagccgcaacgcggaagaaagaaattcttttggaagcaagggatgaaaatcaccgctatcgttctgagattgaaaatgaattgaaagatcgacgcagtgaggtacaaaagcaagaaaaccgtttgattcaacgggaagaaacaatggatcgcaaagatgcaacgttggataaaaaagaacgttcattggagcaacgtgaaaatcgtttaacgaatcaagcacaagagctaactgaaaagcaggcagaagctgccactttagttgagcaacaaaaagcgaagttgcaagaaattgccgaattatcgcatgatgaagcgcaaaaaatcattttggatgaaacgaaacaagaccttgaacatgaacgggctgttttaatcaaagaaagtgaagaaacagctaaagaacaagctgatcggactgcgcgtacattagttgctgaagctattcaacgcagtgcagcggatatggttgctgaaacaacagtaactgttgtgacgttaccaaatgatgatatgaagggccggattattggtcgtgaaggtcggaatatccggacattggaaacactgactgggattgacctgattatcgatgatacgccagaagcagttgtgcttagtgggtttgatccgattcgtcgcgaaattgcgcgcatgacattagagaagttaattcaagatggccggattcatccagctcggattgaagaaatggttgataagtcacgcaaggaaatggacgaacaaatcagacaaatcggtgaacaagcaatctttgatgttggtgtgcacacaatgcatcctgatttaatcaagattcttggtcgattacatttcagaacaagttacgggcaaaacgtcttgaatcattcaattgaagtggccaagttaacggggattttagccgctgaattgggtgaagatgtgacactcgctaaacgagctggcttgttacacgatatcggtaaggccctcgaccatgaagtcgatggctcccacgttgaaattggggttgaactagcaacgcgttataaggaaccggcaacggtgattaacgcaattggttcacaccatggtgatactgaagcaacatcgattatctcagtcttagtcgcagctgctgacgcgatttcagcggctcggccgggtgcacgttctgaatcacttgaaaactacattcaccgtcttgaaaaacttgaaagtattacgaatagttttaaaggtgttgatcatagttttgcgattcaagcgggtcgtgaagttcgggtgattgttaaaccagaacaagtcacagatgaccaagcaaccgtcttagcacgtgatgtgaagaatcaaattgagaaccaactcgagtatcctggccacattaaggtgactgtgattcgcgaaacaagaacggtcgaatacgcgaagtaatgcggattggcctaacattgaagcgggggacaaaaccaattttgttccccgctctttttttggtttagtggtggttctttttttattttagacattagttcatttaattaggaattcagatagggaaatatactgaaatgaacgtaactgataaagtcggtcaagagtggcaatttatactaatttttgaaattacagataaagaagctaatcagggcaccgttgatttgaagaaagcaattaactgaggtgtcttactttaattgcctagcttgtttagttgacccacttgtctagaaatgttaaattgattctattcaataaaggcgttgattgttgggaggcgatgaaagtggatgaacgcattacagaataccgggatgcggtttatgagcaggtggtcaaagtcgggaagtcgttagggaacgtgacgcgtctacaactgttgaacattcttgcgcaaggccccaaaacggtggaagtcttagccagtacagtcggcttaagtgtcgctaccgtttcacggaacctgcaaattttgaaacaaacaaacttagtggcgattgaacgcgagaagaattttgttacttatcgtttaaattcagaacgggtcaaacaattggtaaccctcttggttgatgtctgcgaagaaactttgccagagatgacgattttggaaaaaacactcgcgcaagaaacaggtgcccccgaagcgttaactggtgacgcattgaaaacgaaattaatggcagacgatgtgtgtttgattgatttgcgtcccgcagatgagtttgcaagtcaacacttaccaggggcacgcaatgtgccatatgatcagttggatcaacgattagctgagctccccaaggataaagaagtggtggtttattgtcgtggtcgtctatgtgcttacgccaatgttgccagtcaacaactacaagctgctgggtttaaagtggcaacgtttaatcaatcagtgtgggaatggtcgcgagttatgaccgaaacggaataagatgaagcgtcctttttgacggcacgtcccaatggtggtatattatgagtaattcaatgaaatcgttgaatgattttcttgaaaagaaaggtgatcgcaatggcaacacaaattctaactgaagcaaactttaaagatgaagttcaagaaggggtcacattagtcgatttctgggcaacatggtgcccaccatgtcggatgcaaggcccaattgtcgaagaactagccgacgattacgcgggtaaagctaaaatcgccaaagttgacgttgatcacaaccaaaacttggcggctgaattcggcatccaatcaattccaaccttgttggtcatgaaagatggccaattagtgcaacaaatggttgggttacaacggaaagaaacattagcacaagaaatcaatactgccttagcttaaaaatagcttgaaggcgtatcacgattaaataataacatcatccgataagctcttaagtagggcatatattaggtgatgtttttttgtgttgttattttaagtaatccagcataacggctttaaagaagtcgatgtgtttgaggtacatttcttcatcaacatattcgtcaatcatgtggctagtatcattgccggggccgacaactgccactggtaagtcaggattgtgcttagcaaggtgggcggcgtcggtaccgccagcaacgtgcatcagtggataagcttgggataacttttgtgccccgattttttgaacagcttgaatgaatggtgcttgtggattgctcttaacgggtggttggttattaatgacggtcaattccagattcatgtctgcctgttgattgagttccgcaatgatggtattgaggtcagcaatcacttggtcgccagttaaggcgggggttgtacgaacccgacaagtaagttctgcgtgaccggggaccgaattaatttgttcaccaccgttgattaaggttgtgacaggcacgatatcgccgaggacatcatcaataggatgtttctgatcgaagtattgtttttgccgattgtagtaggcaagcaaatgatcaattgcgttaataccgagtgcgggcattgaactgtgcgcggttttaccagttgccgtcactttaaaatcaagggaaccgttatgggcgaaaattaagaaatgttgttcattggtttgattagccgcaaggagtttttgggccatttctgtggggaatttgtcggggttatttgccaaggcttgtttatcaacgccagatggttcggcaactaataaggctgttaaatcatcggcatagccttgagcggttaaagtttgcgcaccagtttcgttcttttcttcatcgacggttgcgagtagtttgatttggccgtttagaggaacatgttcatcgtgtaattcgatcattgcaatcacaagcgcagccagaccagacttcatgtcggttgcgcctcgaccgaagagtttaccatcgcgagcggttagagtgaagggatcactcgtccatttgctgcgatcaccgatgctgacgacgtccatatgaccagtgacaccgaggactttgtcggttgctttgcctagataggccactaagttttcgcggcctggtttagaagccactttttcagtatggataccatgttgtgcgaatagatcggctaagtagtcggcaatcacaccttctgcttggtctgttgtatcaattgagaccagtttttctaaaatcgcgattttttcagttttttccatgtttttaagacctccagataagattacataggcattatagagcccctattttgggaaagcaacggacataaattaagaaatttcgcaaatcaagtgggttaaaaaagccgtcacgcttagcgtggcggctttttattggtctggttggtgagggcttctttaaaagcctgaccggcgcggtttattcgttaaaccagtgcatatcaaacagaacgcatggattggtgccggcgcaacgattttaccgggggtgacggtcggtgagaatgcgattgtcgctgctaacgccacggtcaccaaagatgtaccagacaatatgattgttgccggaacgccagcgaaagtcatgcgtcaaatcaaattagaaaaggagttttaacatgtcaattcaaaataaagtcgtgatcattacaggtgcctcatcagggattggggcagcaactgccaaattattagcaagcaaaggggctaaggttgttttagcagctcgtcgtgaagatcgtttacaagctttagcatcagaaatcggtgcaaatgcgatttatcaagcaacggatgtgactaatcgggctcaaatggcgagcttagtccaattggcgcttgatcatttcggttgcgtagatgttttatacaacaatgccggcgtgatgccacaaggaaacctgagcgaacgcgattatgatcaatggcaaaagatgctcgacatcaacatcatgggcgttttaaacgggatcggggcggtcttaccaacgatgcaagcccaacaagatggtttgattatttcaactgattcggttgccgggcacgtggtttatccagcttctgccgtttataacgggactaaatatgcagtacgcgctattatggaaggcttgcgccaagaagaaaaagataacggcattcgttcaacgattgtttcaccaggggctgttaaaacagaattggtgaatacgattggcaaccctgctgttttcgaaggggttaagcaattaatggatgcaccagaagaatcagcgttggccctcaatccagaagacattgccaacgcagtcttatatgcgattgaccaaccagaacatgtagtggtcagtgaagtcttaattcgcccagctaaacaacaagtttaaaaaagtggtcgactaagcgattagcctaagcaggcgaataactgatgcagttagttgtttgactgatgtagctaaacacaaggcattgcttaggcgagcccgtttcaaagtggtatttagctactgagaattaataaaaaatcaccttaatctgttttttaagattaaggtgatttttttaattaagtgcaaccaagctgataatcaaaatatgaaatggatgacaacagcttttttaggctaaaagtcgtataatgacagtattctaaatgaaattggagatcataatatggcagaattgatgcgtttttatcaaagctttcaaccggaacattatcaagtttttctagatattaatcgggctcaaaaacaatttagtggtcggacgacaattacggggactgctaaagaagcacttgttttaattcatcagaacggtttagtgattgaaacagtgacggctgcaggtaagagtgtgccgtttacagttgataatgacgcaaatgccttgaaagtcgaagtcggccaacctggcgaagtgactttggtaattgcctatactgccgctttaacggattcaatgatgggcatctatccttcttattatcaagtcgatggggtgcaaaaagaattaatcgggacgcaatttgaaaccaattttgcgcggcaagctttcccatgtattgatgaaccagaagccaaagcgacttttgatttagcgattaaattcgatgagcacgaaggcgaaacgattctgagcaacatgcctgaaaaagaagtcatcgatggcgttcactactttgaaacaacggtccggatgtcaacgtaccttgtggcctttgcttttggtgaattgcaaggggttcaaactaaaacggagagcggcatgcaagttggcgtctttgctactaaggcacatcaagcaaacgaactcgattttgcattggacattgctaaacggtcaatcgaattctttgaagacttctaccaaacaccctatccattaccccattcatggcagttggcattacccgacttttcggccggcgcgatggaaaactggggcttagtcacttatcgggaagcttatttattactcgatcctgataatactgccttggatacgaaacaccgcgttgcgactgtgattgcgcatgaattagcacaccaatggtttggtgatttagtaacgatgcaatggtgggacgatctttggttgaacgaaagttttgccaatatgatggaatacgtcgcaatcgatgcattgcagccggactggcatatttgggaaagtttccaaacctcagaagcagcggcagccttacaacgtgacgcgactgatggggtccaatcggtgcatgtgcaagtcaataatccagccgaaatcgatgcgttatttgatggcgcaatcgtgtatgccaaaggcgcccggatgctcgtgatggttcgcgctttaatcggtgacgatgctctacgcgctggtttgaaagcttattttgcagcacatcaattcggaaatgcgactggcgctgacttgtgggcagcactggggaaagccgctaacttagatgttggggccattatgcattcatggctcgaacaaccaggttatccagtggtaacggccaaagtcgttgacggacaattaacgcttaaccaacaacaattctttatcggtgagggtcaagaagttgggcgtcaatggcagattccattgaagagcaactatgcggcagccccattattgatgactgaccgtgaattggtactcggtgattatgctcaattacgcgccgacaatgggcaaccattccgcttaaacgtggggaacgaatcgcatttcattgttcattacgatcaaacattattagatgatattttaaatagtagtgctgacatggcaccaattggacaactgcaactactgcaagacttacgcttattagctgaaggacgtcaaatttcgtacgcagatgttgtgcctgttttagcaccttttgccaagagtgattcaaatgtcgtggcagatgccctttacacggttgctggtaacttgaagaaatttgtgacacctggtgaagaaagtgaacaacacctgcgtcgattcttcgaccaattgagtaaagcgcaagttgcgcgattaggttggctggttcaaccgactgatagcaatgacgatcagttaatgcgcccaactgttttaagcgcagccttgtatgctaaaaaccaagcagccattgatgtagcccatactttattccaagcgaaccaagaaaaactggtcaccttaccagccgcaattcgggtactggtcttgatgaatgaggtccaaaacttcgggaatgccgcactttatgatcagctcttagcagcttatcgccaaacgagtgatgcgagctataagaatgatttgactgcggccttaacgcgcacgactgatcctgaattaattgcgaccttaattggaaaatttgaagatgccagcaccatcaaaccacaagatttgcgggcttggttccgcggattactcgccaacgacaagagccaacaagcaacctgggattggattcgcaacgattggcaatggctagaagagacagtcggcggtgatatggaatttacaacgtatatcacctcgattgccgcaatctttaagaccccagaacggttggcagagttcaaagccttctttgaacctaagctcaacaccccaggcttaacccgggaaattacgatggacattaaagtcatcgaaagtcgggttgcattgattgaagatcaaaaagcagcggttaatgaaacaattgccaaacatatgtagtcgaacgttgtgcaagttaaattcaatttgaggggttttgagatgacgattaaattagtcgcgattgatattgatgatacattattgagttcacagcaccaactgctagccagtacgaaacaacaagttgctaaggccctggaacagggtgtgaaagtcgttttgtgttccggacgcccattagctggcgtggtgccctttttaaatcaactagggattgccggtgataatcaatacgtgattacgtttaacggcagtattatcgaaacggcgtctggtaaaatcttgaaagaagctggcatcagccgagaaacctaccaagcgattgacgactactcgcaagcaacgggcttaccgtataatgtgctcgatcaaaatagtgtgatttatacgagtaatgtgaatgttgcaccaatgacggtggtgcaagcttgggaaaacgaagctggtattcatattcgcaaaccgaatgaaatcgacgcggccacgcagatggtcaaagcggtctttacagggaccagcgaacagttagatgtacatgaaccacaggtacacgcgcaatttggaactgataattatgttgttcgtgcggctgacctctttttagaagtgatgcatactgatgttaataaaggcaaagcagtgcaatacctcgcgaataaacttggattcgcgccggatgaaatcatggcgattggcgatgagaaaaatgacatcccaatgttccaatttgccggtactgcggtggcaatgggcaacggttcagctgaagcaaaggcgcacgttgactttattactgctgataacgattcggacgggatcgcccaagcatttgatcaatttatttttaaagtataatcaaaaagcccctgacttttgtcaggggctttttcttcgatatgtacaagctttccgacacgaatatgattttgttcaacaaaggattaatgctggctatatcaatcaatcgattgcaggcgttttgtataccgaaattaatcaagcacagttattgcaactccaacaattccaaggaacggaaactcgagttgcaaaagctaaagcccttctattggggttcgttattaattgatggctttattttagtgattttaatgggtcgcttttatcaattaccattcctgaaaactgatccgtttttagtaatggtgattttgctaatcgaagtagctaatctctacatgatgttgacggttcgtaaccgtcaacaacagttaggaattcaagatatatcacagaagtcgatttgttggttattcgccagcctaggctatactcagaagttaaccgccacaaacgcactttattttaatactaatttagtgacactttcgacgtgtagcgtttgtgggaacatgtcgactggttgtgtgctttctgcttggtagccttgggctgccaatagttctaaatcacgcgccaatgttgctggattacagctgacatagaccatcttggctggttttaattgaccaacggcttcaatgaagctagtttccaaccctttacgtggtgggtcaacaatcaaagcatcgacttttaagtcatctgcttgccattgcgccatcacttcttcggctttaccgagtgtaaattcaacgttttcgatgccgttaatcttggcattgtgccgcgcatccataacagctgattcaacaacttcaacaccgtaaacttgcttagcatgtttagcgactgctaatgaaatcgtcccaatccctgaataagcatcaatgactgtttcgttccccgttaattcagcagcttcgatcgccttgttatacaagacttccgtttgcactgggttcacttggtagaatgattgcgctgaaatttcgaacttcaagcccattaattcatcacgaataaagtcgcggccagcgattaattttgtttcgtcaccaaagatgacgttcgtttgagcagcattgacgttttgcatgatgctgaccacttctggtaaagcttttttgatttcaacggcgatttcacgggcagccggtaatttcttactccgcgtgatgaagacaatcatcatttcgtggctgtaataaccgcggcgaaccataatggtcttcaaaacacccttatgcgtatcttcgttgtatggatcaatgtagaaacgacgcaagatatcacgaatgaccttgatagcttcatcaatcttaggatcttgaatgtagaagtcttccattggcatcacttgatgactgtgtttccggtagaaaccagttgttaaagcaccatcgataaaccgaacaggaacttgcgccttgttccggtaacctgttggatcatccatccctaaaacaggttgcactggaatatctaaatgggctttttggaagacgttcaagacttggttacgcttgaaatctaattgggctgggtatgccaagtgttgtaatggcgcaatcccagtttgtgagtaaatgttagcttttgattcaacgcggtctgggcttttcttcaataaattaactaagcgcgcaaaaccatattgtttattgacctttgtgacttggatttctgcttgttcatcgggcaaaacgccttcgataaacaacggatagttgtcgactttagcgacacccatgccttcataggttaaatccataatatcaaccgtcaatgtttcattttttcttacaggtgcttgtattttcatagttacctctttttaattgtgtaaaaagagtctgagacaaaactgagttttgcttcggactcttttcttagctacaagtgtgcggtcaatccgcccacgttatccaatgttccagtttaacctattttaccatcgccgtctatgtcttcttcagaaattgcttcgacttcctttacgaataaatcttcggcagactgctgagtaggggtttctgatgtaatagcgtgatctggaatatcttccttattcacatacatctcgatatgttgttgcaagttagtaaaggtcattggtgcatcgccaccgtattcgccatctaaattaatcatcatcttaacgtcatcatcaccaggacgcgcaactagttttgacgtcttggtataaatgacccgtggatcattaacgtgtttgccacctttaatgacgagtgcgattaaatggactaattcggccatgttggctgtcttaaccacaatcaatgagaaattaccatcattcagttgtgcatccggcgcaatctgttcaaatccaccaactgaattggttaaaccgagtaagaatagggaagcttccccatcatacgtaccttcatcatattccagatgcatcttaatcggtttaatttggggtaacatctcagcaccttttacgacatacgcgagatagccaaaaattgacttaaagtctgaggggacttcataggtcaattcggttagcaaaccaccaccagcaatgttcatgaagtaattgtcattggcttgaccgatatccatcttaagcgtttggttcttcaaaatcacgcgggctgcttcaaccggattatcacgcggaatcttcaaagcccgagcataatcgtttgttgtcccagccggaatgacggccatcattgggcgtttttccaagccggcaatgccgttgacgacttcattaattgtcccatcaccgccagcggcaacgattaaatcgaagtccgcctttgctgctcttgtggcctctttttgcgctgaagcttcttcaggcgttgtttgaaaagcactcgcttcataacccgcttgttccaaaatatccagaatatcagcgacactacgtttcatcacttcatgtcctgaagttggattataaattaaccgtgcacgtttttgcattcgaatctcctaaaatatcaattatcgtttgttcaattcggccatcaacaagtcattgacaactttcggattagcttgaccccgtgtttccttcataatcttaccgactaagaacccaactgcgcggtctttaccgttcttgaaatcatcaattgattgttggttgtcatctaaaatacctgtgatgattggtgtcaacttagcagggtctgataattggaccatgcctttagcttcaacccaggcttttggatccgtgtcattttggataatttcttggaagactttcttagcaatcttcgatgaaataatcccgtctttaattaaattgatcatttgggctaagtgggcaggtgtgagggctgtttcttgaaggtcaatttgtttgtcgttcaagtaagcattcacttcacccatcaaccagttagaaacttgttttggtgcggcgccatcagcaacagctgcttcaaagaagtcagacatttccttggtgttcgtcaagacacccgcatcgtattcaggcaagcccaattcatccacatagcgtgcacgccgtttagccggcatttcaggcatattgtcttgaacttcttgtaaccaatcatcaccaatgtgtaatggtggtagatctggttctgggaaataacgatagtcatccgcaccggtcttaacccgcataaggaatgtttcgcctgttttttcgtcaaaacgacgggtttcagggcgcactgtttcgccagcaatcaaaagttgtgattgacgcttgatttcataagctaaccccaaacggacgtgattaaaggagttcaagttcttcaattctgatttcacaccatattgcttcgcaccgattggtcgcacagaaatgttagtatctacccgcattgaaccttcttccatcttaacgtcagatgcgccagtaaattgaacaatttggcgtaacgtttcaaggtaagcataggcttcttcaggcgttgacatatcaggttttgaaacaatttcaatcaaggcagtcccttgacggtttaaatcgacatatgaatagccgtcagagccatgggtattcttcccggcatcttcttcaacgtgcaattcggcaatcccgatttgctttgtatggccatcgacttcgacttcgatatagccatctttaccaaggggttgttcgtattgtgtgatttggtaagcttttggattatctggatagaagtaattcttccggtcgaaatgcgtatcgcgcgcaatatcagcgtgcaaggcagtcgcaaccatcatcccaagtgtgtatgcccctttattcaaggttggcaatgtcccaggataaccccagtcaatcacattcgtgttagtattcggttctgcaccatagtttacaggagatggactgtacatttttgaattggtttttaattcaatatgcacttcaagtccgattgttgtttcgaaattcattaggcttttcctcctttgaagcttggaacgttcttgttaaattgagttgcttgttcaaaggcataacctgcgcgataaacagattcttcatcaaatgctttcccaataatttgtaaaccaactggcatgccatctactaagccggcaggcactgacattgctggtaagccagccatgttagcaggaattgttaagatatcgttcatatacattgtcactggatctgatactttgcgacccaagtcaaaagcggtggttggtgttgttggtccaaccactaagtcgtagtctgcgaaaactttttcaaagtcgcgcacgattaatgtccgcacttgaccagccttcttgaagtaagcatcgtaaaagcctgatgaaagggcaaacgttcctaacataatccgccgtttcacttcatcaccgaaaccttcagaacgtgatttaacatacacatcttcaagtgtcttggcttcaggtgaacgataaccataacgaatcccgtcaaaacgtgacaagttagatgaagcttcacttgaagccataatgtagtaagtttggacggcatacttagaatttggcaagctgacttcgtcaacggttgcccctaatgatttcaaagtttcaatggctgtttcgatttgggctttaacgcctggttcgacaccttctgccatgtattctttggcaacagcaatcttcatacctttgatgtcaccatttaaagcggcacggaaatcaggcactgggatatcagcactcgtactatctttttcatcatgaccactgatggcttgtaaaacagtcgcattatcagcaactgtccgactaaagaccccaacttgatcaagacttgaagcaaaagcgatcgcaccccaacgtgacacacggccgtatgttggtttgatgccgacaatcccattaaatgcagctggttggcgaattgagccacccgtatctgtccctaaagaagcgatgacttcaccggccgcaactgctgctgcagaaccacctgatgaaccaccaggtactttgtctaagttccaagggttctttgtcttcttgaaggctgatgtttctgttgatgaacccattgcgaattcatccatgttgtttttaccgatcacaattgcatctttagcttttaatttttcaacaaccgttgcatcaaaaaccggcgtgaaattttcaagcatcttgctggcagcagtggtcgttaagccatccgttaataagttatctttaatcccgattggcatcccagctaataagttatctgcatcaattggttgggcgtccactttggcagccgcagcttgtgcaccagcttcatcgattgctaaaaaagcatcaacttgtggttctctcttgtcaatttcagcaactgtttcagttaccaattggctagcagttaagtcaccagccactaatttggcatggatactttgtaaatcttcatataagtagttcacggctagtcttcctccttatccataatggcagggactttcaataagccgtccgctgaatctggtgcattcttcattaaaatctcgcgatctgtgccagcttgagccacatcttcgcggacaatattttgaaggttattcacgtgggtcgtcactgggacacccgttgtatcaactttatttaattcatcagtcattttcatgatgtctgcaagttgttcagtaaattgttctaactcagcatcgctaaaagctagttttgaaagttctgcgacatgctgaacttgtgttttatcaatcatgagtaaacccctcttctaattctgtcacttttatctattctgattaattttaccatatattaacgtataagaaagtgacatcccttgaaatttaccagtttttcctaatctttaccggtttcagcagatattgaaatatatttttactttctttttaaaagcgtaattgaatgttatgcaattcattagaaggtgatatgatttataagagtttatcatataaacgaattcgtttaatcttatatactgaatacagataagaagttgtgaataatgtacaagattatcattaacttatagatgagtgttataatatgaaaatcaatatctcggaacaccttgtagcagtagcagttttaagtttaatgggtggcattgtcttacaaagtacgaccgtttcagcagcgaccacttcggttggtgtaactatcactggtgtaacacctggaatggccgctaaagccaaagaagcagccgcagaacaatccgctttagaagaagcatggttacaaacagaaatcgatgacagcgaacctgtagaagttaccgaaacaattggcggtcaaacaactcactactgggaatcagcagatggctcacgaagcacaactgccgccgcggaagttcaagacgaaacagtagccgcaccggaagtagcacctgaacaatttgaagaaacagcagttgaagaagaccaaccagccgaaaacttcaaaccaatgcctaagaaacatgacatcgatcaaaaagcagttgctttcaaacaactcacaacagattgggctagcaatcaaatcatgtcatcattggaagacttaatcactaaggctttccaacttaacaaataacactcagtattagctaagcggcaagtatcgtaaccaagcgtccccagttttgagtagtttcaaaagcaacactcaatagtctgtcggtgtaacttacggatttacccatactagaagttactaaactatttagaattgtttttttcctattttaaacgtttataaccactccactgctaaaataatttcattaaagtttgatgagttcacccaaaattttgggtgaatttttttattgcttaatgatttttcaaaaataagtctaattttaatagacatttcacaacttatttcatgctcataaaagaacccaaacctactgatagaagcaacttaattgattatcgggctgtattatcggtatccagtctgaactcccttcatgtaattttcatttacggcagactctggctagcctgattacagcagaacacctcaataggtgttatactcttaataacatctttttaaaaggagtctatcatgaaaaaatcagtccgtttaagcaatgccgtccacctgatgaccctgattgctttaaacccgtttgataacctttctagtcagcgcattgctaaaagcatcaatactaacccctcttttattcgccaaatcatggggcaacttaagacagctggcctattgacgagcgttaagggccatgccgaacccaaactaacgaaagctcctgaccaaatttcgctctgtgatatctataaagccgtcgatgatacccggttattgaacatcgatacccaaattgatcctagttgcggccccggacaaaatattcaattatcgcttgctacctattacgatcaaatccaagaaactgctgaacagcaaatgcaagccatcaaactagccgacattatcgaacaatatcaacaacgcctcgttgaaaatccagaattaaaactttacgaaaactaacacacaaaaaggttgggtaaattgcccaacctttttgtgtgttaatcttcagcggatacccggctgatgccgcactcttttcttttaaacgtgctctatcagccaaccgcttccggttaaccctgaatggcaaacaatcgctaacccggttattcaccattctgtgttaatcctcagcgatggtcgtgatgccgattcagtcaactatgagctggccaagatctgtcaagaatacggatcaatcatgaagtcagttactgccgataatggcgctgagttctcggaagttggcgctgtacttaccggtgtcgctgacctttattatgcccatccatctcgttcctctgagcgtgggactaacgaagcgcataatcgaatgatccgccgcgatgtacccaagggtctatccatggatattttgggtcctcatgatatccaagcagttgagtcaaagctaaacaatttaccgcgtcggcaaactggctatcaaacacccaaagagcttttctccgctgattccgccggttaagttaagtccataaaatatgaatattaatgaaaatactgatttaataggatttatcgtgtggctaatttgttcttgcaatttgggagtcgaaaacaaatggatttcattcaagattaaaatgagttatattgtctttaaatataataaggattggtgatgatcatgaagattgttgtgattggctccgttgcagcggggacgagtgtggcagcaaaggcgcggcgaaatagtgaagttgatgagattgtcgtttatgaaaaaggtcaggatatttcttattcggtttgtggcatgccttattacgtagggggtgaggttgaagacctagagacgttaattccgcgcgatgcggcgtggttcaaaaaacgcttcaacgttgacattatgacgggtatcgaagtgatttcaatcgatgaaaaccaacaagcgctggtcttgaaaaactttgagacgggcgagttgtttgaagattattatgaccgcctagttttagcgacgggggccacgccacgcattattgcaccgttcgatgaagcctaccaaaacgtcttcacgatgcataacatggtagatacacgcgcaatcgacgcgtatttacagcaccattcagttcaaaatgtgacgatttttgggaccggttatgttgggcttgaaatgatggaacaatttcaaaaacgtggcttggacgtgacgttagttcaacgaagcgcgcaaattatgacccattttgatggtgatatggcctatcgtgctgaacaagttattcgtgctaacggggtgcatgtgttaaagagtgtaaccgcaaaacaagtgactgcgcaggatggtgtggtatcggcggtagaattgagtaatcagacgaccattcaaacggatttggtcctactagcacttggcgttgaaccacaaacgcagttggtcgaccatatgaagatagctaagggaccttcaggggcgttgaaggtcgaccaacaaatgttgacgactgtaccgaatatttacgcggtcggcgatgttgttgagagtttctccgtaattgatggctcaccactgtatcgaccaatgggttcgactgccaataaaatgggacgaattgccggcaattcattgactggcggtggcttaacgcaccgcgggattcttggaacggggattgttcggttgttcgatacaacgattgcacagactgggtttactgaagcagtcgcgcgagctaaggactatgatgtggaagtactctacaacattaaaccagggcatgcagattacttaaatggaaccgaaaacgtcattaaagccattgctggccgtcaaacgggaaaattattaggtgtacaaatcattggtaaagatggggttgataagcggattgacgttttcgtgactgccatcacattgggtgcgaaggtggccgatttattccatctcgatctagcttatcaaccactctatgcaaccactaaggatccagtgctctatacgggaatggcgctcgataatgcattgcatgggcggccgctcttgcctccagctgaattggagcaacgcttggctgaaggtgaacgcttccagattttggacgtacgttcgaagcaaaaatatgcggacgagcatgttgaacatgccattaacatgccgcttgctgaaattcgtgatcggttcacggaattagatatggatattccaactgtcacctattgcaataaaggggttacggctaatgctgctcagaatttacttctgaacctcggttttaaatccgtgtataacttgagtgggggcttcaaaaattatcaggtagtcaaagcctacttgaatgataaataatataaaaataccgctgacaattcgctgtcagtggtatttttttgcgttgttatagatttttggtgaaaaattgagttaattctgaaaaaggaataagcgcgatacgatcatataaatcgacatgcccagctgcttttacggttaataactgttttgattcgttagcactggcaaaggcggcttcactgaaatgtcgtgaccatgcctcttcaccaacaacaaagagcatggcacgttctgtgatcgtttcgaggtcgcgcaatggatagaaatctaatagtttagtaaaagttgtacgagtgggatggagtgtcgagttggctgcgccacgttgggtacgataaaagtcgtagaattcacgttcgatatcagttgagttttcgtccagttcttcaggtactccatgggcgtaagtggttgcttgacctgcaatctctaatgtccgggatcgtgaggattcctcgattaatgcgttgccgcctagtgcatcacgctgttcgcgaacaatggcacccatatcggttaagttaatagttgcaagtgctttaatacgtgcgtctattttgagtgcgttgagcgcgaaaccaccggccgaaccaattgcgattaagccaatacggtcattggcgacacagtctagagtggttaggtagtcagtggctgctgagaaattctccgcatataagataggggcaatcgcgttgcgcagagcaccgttactcccgccccaagcagattgatcaaatgaaacggttacaaacccttgttcagcgagcttaatggcatataggttagctgcctgttctttaacggcaccgatgggagcaccgatgattagtgctggaaaaacagtttccgtcgagtctttgggaagaaagacgttagcagttacttgcatttcatagatattcttaaaagtgacgggatgctgttcaacggctgaactttgaaaccagttattggcgtcgtggtggacatcgccagttggtaaatccggattacgacggcgtgcattaattttaccggctgaatacgacggttgtctagatggcatgctactcctcctataaaaataatttcttatccttattataaaatataagaatgtgaaatactactttatattattaatttgtaaacgattaatttgatgtctgctagtgatgattgtaatagtcgataatggtcagatggttggcattttatagtgaaaataaaaaattaattatatgattctaatgagcgccctcaaaaaaattgatgttgactgaataatgaataaatttacattttatgaatttcgtttaatcgctcgtgagcagattgtaaagaggactaagctagtcatttatcagtgttactgattgaatttataactattttatcgcccataaataggtttaaatagacatttattttaaggctagattgtaagttataatctggttctaaccatttagttaatagcgtgaacgataagcgttaactggtgaataaatatcaaatagataacttgctaataatttagttgtggcgtagaatgagttttggaaacacgttaacctagacaacgattgacttacaatagaaatgcagcatataactttcggcaattagagacgaacgttaaaaaatagtgaatacatacgattataaagttaatgacgctaacagtataaccagcgaaattattgggtaggataaaaaagcaaatcaaggagaacgtttaagttgaaaattaataaactcttaattgactgtgatgtggggattaaatcaagtgctcatcatgtacagtttagtcagagcaatatcgctggtggacgtttagattgctaattaattaaccctgatgttaaattgtttgcaatagagacaaggataaactgtatatataatgtcatcaatgattaattgatataatttttatctctatttaaaacgctagtagccaggggagtaatttaattgataggatgattcgacgttttgattaataagcaaagtgaattaagtcggtggtatatcgactatcgggaggttttggctcagcttagtaggatttgtcgaggatacggactgggattagacgagttattattttagaacaattaacgattaatgacactcagttgtcagggcaattggcagaaacttttaaaatgtcttatccgggaattacgcgcaaattgaacttactgcaggaaagaaacttagtgaaaaaaatccgcggtgaacggcaagacttacgccttgtcgatattgcgattacagcggatggacagaaggtttacgaacaaatcatcgcagaagttaccgcggataagttggatgaacgaatgctaactaacttaacgagcgttaatcaagtagattaaaaaaacggcaaaaacaggcatgagagacttctcgccgtttgtcgcttttgacatatttatccaaagaattcattatcatttaaagaatcaccacccaagatattgtgatagtgtaataatccctttatggttgtcagatgaaataatataatttcatttgataattatggatggatttttgtatgccgagatctaaatacacagcattcgaaaaattaacactgatcgaagaatttaaacgatccggaatatcaaaggaggccttttctagagggtatgacattgatctaactacatttaaccactggttaaatcgatatgaacgagatggtattgatggtttacgaaaagcacgtcataataaccattacccaaaagctctaaaattagaagcagtagtaacctacctatctgaacggtactccttaaatgaagttgcacttaaatttggattacgttctaaaaagcaactaagagactgggtctccgagtataataaggataaaaccgtgacggcatcaccgtccagaaggcaggtccctgttatgagtcgtaaaactacttttgaagaacggatttcaatcgttgaatatgccactaaggataagcacagctacactgaaactgcagaacacttcggtgtttcttaccagcaagctcgttcgtgggttcttaaagcacaacacggtggttatgaagcactcgttgataatcgcggtcatcataaaatacaatcagaactagcagatttagataaggcgaacctacggattcgcgagttagagagtcagattgaagaccagaaattatatgtggcattcataaaaaaatatcaggaacttcagcgcaaggggtgaataaacaaaggcagctagcatactacgcgattaaagatgttagccgaggaaaacatggcgcgatcaccaaactcctaaaaataattggtgttagccgtcaagcctataacaaagggttaaaaagactagaaactgtttgggagacacgtaataaataacttaaagaacgaactcaatactggtttgacttcaatctacaaggaatcggtactggaaatatgttagtgaatttacaagctgacgcatcaattacttttcccgttacttttaaacaagttcgaagagttatgcgagaactaggcattcggtgtttagtacatccgaagaagcataaccgtgtgaagcaatcagaacaatatattcaagataatcttctcaatcaaaattttaatgtgagtagacctaaccaagtttggttagccgattcaacagaactttcgtatggcataaatggcgaatataaagttcgtttaagtggcgttttggatctttatggtcggcgactgttgtcctatcatctaagccctaccgaaactagtgaaacagaagtttaagtgtttcagcaagcttttgccggggctggtagtgtagtgcaccctatggtgcacactgatcgcggttcagcatatacatcaaaaatgtttagccgctatcttgatcaatatgaggtgactagaagtatgtcccgaccagggacaccgtatgacaacgccccgatggagcgttggtggaatgaatttaagcatcgatggatggcacgacatccaatgccaaagacctatcaagaactaatgaaattggttgaagcaggaatcgaatattttaatcactataatcgttcaacacaaagaaacggccttactccagatgaatactggaataaagccgtttaggaacatattaaattttatattatttcatccggcaacttgacaggcccctagtacatagcttgagtttatgatgtatgtattcggtggattaattgttctgttaattgttggattggcactactctcaagtcaatggggcgcaattggcgttattagtgggggcgttgttggtgggattgtcatgcggcttcgacaacgccgctcgaagaatagctaaataagtgcctcaaatacattagttgtgcctgcgttttggagtctgttagtgacattaataggggtaattagcttggtcaaacgaaataaaaaagcttaattaaagaaaaaagcgcggtagatttgtaaaaatctaccgcgcttttttggattaagcaaacattttcttagttgcgcgcatcaatgtcttgatgtcacgatcataacgtggtgtatcgactaacttggccattggaatgccagcgaagtgataagctgcaatttcgccagaacgaacagcactttgttcagtgaaaatcatctgataaggttgttcaacgaattcaccagtgaaggctaagttggttgaatgttcggggatgacttctggacggtcagttttggcacgattattaaagagtgctgaagcatatggcatatagacaggaatgttattgatgacactgtccataatttcagcttctttttcacgaatattgattgggccaggatcaacttttgatagttggccaattaattcttgaagcatttccttacccgtcatttcgatgtaaggtttatccacaaattcaccgttacgacgtgggtagaggaagtaaccccagataaccgcttcgtttggtttttgcgttgtgaagtgtggttgatggtgaacaacaatcgacatattcacatctttttgaccaagtggtgtgattggtttcgttgataggaacgaattcaaagcattcccaggaatttgcgttgtaatccgttcgatttcgtttaacaaaatatgattcttagtcgttaaagtgaagctgacccactcactggcattgcggtcagcgaagaatttatcgggattgccaagattatagaatttagaagcgacttgtttccacagaccggcagcagcaccataatccatgttttcagctgctggtgtattataatcgccaagtgttgcggaatcggtaattgacccgtttgtgaagatgaccgctgtgtcgtcgtccaccgtaacgtgttcaacttcatctgtctcagtattagtcattgtcataccagtaaccgtaatttcatcggtcatctgagtctctttaaagtctaagtcagtaatccgtcgattgaggataatgtgacaaccttgcgcttttaagtagttaatcagcggcagcatgatactttcgtactgattgtaacgtgtccggttaacaccgactaagtgttcaatctgagtgaattcataaatcatttggtgcatgtaacggcgtaattcttgtgcggaactttgggttctgaaagcaaaggtggtttcccacatgtaccagaagtttgtttggaacatatgtggatcgtccttgaagtattcggcaattgaaacgttgtctaatttttcttcttcagaatcgggcatcataatcaatttggtcattaataaccgatccttattattaaagccgagatgaccagcatccaaaatacctttactaccttctaataaacgtgctttgtcgaatgtgcggtgttgagcatcgaatgaacgggtatcttcttcagccgtcatattgggttcagttgctgaaggaatccgacctagaagatccattaaatcgacataagtccgatagttaagcatccgcccaccacgtgcaacgtagcccttagtattttcgagaggatggtttttattccaatattcatcggttgtttcggaaactgatgccccatcgtttgaaccatggtcatctaatgaatagaatgtaatcgcatcgccagaccaaccgccttcttgaattaaatagactgctgcggccatgttagaaaggccagcgccaatcataattgcttttttcttaatcatatgaaaaacctcctagattcagtttagaaatgacgagtgactaacggctttcgaatttttcgtaatccacagaatcgtctctaaaaagttccattttcttagctaataaacaagcactggttgctgtaacacctacaaaaataaggctgcctaatagaaattttttcatgtttctcgcttccttccattaactacttttgatatctatattataccgcgaattcctaaaataggaagataaaacccttacataggaattgtcagtggtcatgatacgattattgatgggattaggccgctaaaaatcagaatagttaagtttagtttaaggctcttattagtcaggcataattcctagggaagcactaacggatttaaaaaaagtgataggcccccaaataatggttgacctcaagtcagcttgaggttgtaaagtagtcttattgattagaaaaaggagacttttaaatgcaaaaattatctgccttaacagccccaatgaccttaagcaacggtgttaccattccaggattagggtatgggacatatcaaacaccaaatgaagaaacgaaaaaagcggtcttagaagctttatcagttggctatcggcatattgatacagctgccgtttacggcaacgaacaaggtgttggtgccgctttgaaagaaagtgatatcgcgcgtgaagacatctttgtgacaagtaagctatggaatacagaacggggctaggatgctacgaaagctgcctttacacaaacaattgcaacgttaggtgttgactatttagatttatatttaattcattggccagctaacactaaacaatttgaagccaaagatgctgaattaaatgctgaaacttggcgtgcaatggaagatccgtgcaattggtgtgtcgaactttatgccccatcatttagatgcactcatgaaaaccgccgttatcaaaccaatggttgatcaaatcgaagtccatccgggctggccacaagcagaagctgtgcgttataatcaagcgcatgacatcttagtcgaagcttgggcaccacttggtgaagccagtgcgctttcgaatgaaacgattgcaacaattgcgacgaagcacggcaaaacggcagcgcaagtttgccttcattgggggattcaacaagttgtgttaccattacctaaatcaactcctcaagaacgaatggcgcaaaataccgatatcttcgattttgaattaacagatagtgaaatgacccaaattagtgctttggaaaacttaggcggtcaatgcatggtgccagatgacgttgatttttaagcaagtataaggaaggttaatatggcattatcaattggcgtagtcgcccaacaatatgatttgagtattccgacactacggtattatgaagaacaaggattattaccgtttattaaacgcagtccggctggtcggcgtgaattccggcaagctgatttagactgtttatgtgatattgaatgtttgaaaaaaaagggtatgcagttaaaagatattaagcaatacatcgattggcgaactgcaggtgatgaaactttggaccaacgcttggcgttgattcaacaacggcggcaaatgttggctaacgagattgaatcactgcaagcagaattgacgaagctagatcataaagaatggtattacacaaaggcacttgaagccggaacagaatccatttttacagctgactgtgatacagaatatgaacgtgtgcatcaataatcgaaaaaagaggcaacctgataggttgcctctttttgtgtgtttaaacggttaatgttttttgcataatcagatcacgttgtgcgtcgcttccgagttggaagatgtgatcaccaacttggctgaagccgaggtttttgtaaaagttaagtgcagcagtgttgtgttcccacacgccgagccatacgttagttttatggaattgttgcgccacggctagtgcatggttaattagttgtgttcccaaaccaagtcgcttaaaggactgtcgaatatagatacgttcaatctccagtgaatccggggcagctttttcagtttgtgcgccatcaatgttgagctttaaataaccagcgacttcgccatcttgataaataaaatagaagaacgaatcgggattctcgagctcgctagttaatcggtctgtattataagcttcttctaagtagttagcgagatcttctgctgcattttcagcgccaaaagttgctgtgaaagtttcacggctgatggattgtaagtcaggtagttggtttaatgtgacagcttgaattggcattgtgatgcctcctttgttgtaatagtgtcggacgtgtccctttttgacaaaatcccagtttgcggcaacgttggcactaactttgtttaggagtgcttcaagattatgggcctcgtcggtcgtcagtccagtcagtgccatttgatttgaataatcgttttcagctttgatggcgggatagacggctcgaccggcctcggtgagatagagatgtttgatcttacgattggttttgtcagggtgtcgttcaactaaaccatgcttaattaattgttgaacggcgcgcgtgactgttgcgcggtcgacttttaataattcacctagacgttcttgaatgatcccaggctgttctgcaatgcggactaagtaaaggtattgcccgcgggttaaatcatactgttggaattcaatattagcaatggattccaacgcgcgggctataaccccgattgggcggagaatttcagtcatgatggcatacctcatttcgataaaaatagtataaaatatttttgttgcatttacaacaaaaaataaaacttcgattcgttaagtacgccaaaaataagaatataattaattctcgaaggaaataataagaaagggttctctgaaatcggcttctaaagtcgtaaaaggcgcttacaaagcctatattttatgatttgttaagtaagcataatgtttatgtaatgttaatgtaacattcgccctatatacttagtctcagagttcgggcttaactaataggagaaaataaaccatgtcatttaaaaaaacgattacgactacaattgctcttggattattaacagcttcagttctttcaacaaacgtagtatctgctgcaacttcaagtgaagcacaagaagcgattactgctaataagaacgcaacaaacgatttgctcaaacaaatcgaatcagctaatacagaagtgattgggttggatcaaaagatttcaacaaacgcttcaaaaattgctgatcaagaagcagcaattactaaagcaaataatcaaatcgaatctctttcaggtcaaattacggatgctcaaaaagaagtttctaaacgaacagtcgtattgaagaaacaattagtgaccttacaagaaaagagtggggatgctgtcagcgggaacgtatatgttgacttccttttaaactcaaatgacctttcagatttagtttcgcgttcattcacaattaataaattaaaccaagcaagtaaagaagctttagatgatgttaacagcgctaaggcaaaattaagcggcttgaagacagaacaagaaaatactaaagcaagtttagttgctactaagactgatttagaaaaacaaaaagcaaacttagaatcattgaagagtgaagctgatcaaaaacaaacagctttatcacaaaaaatcaatgataacaaagacgaattaacagctttacaagcagatttcgacaaagcaagtactgaagaagcagacgctgctgctaaaaaggctgcagacgatgccaacaatgccaacaatgctaaaaaagacacacctcaacctacatcaattgacacgccatcagataataagggtggcacatctgttttcggtggcagcggaaaagttgctggtaattcagctgggaattcatatgcatggggtcaatgtacatggtatgttaagtcagtagcaccttgggctggcaataactgggggaatggcgctcaatggggtgcttcagccgcagcagctggcttcacagttaaccatataccagcagcaggcgcaatcgttagctttgctggtggccaaatggtaggttcttgggccgcagatgggacatatggtcacgttgcttacgttcaatcatacgatgccgcagctgggacaattaccatcactcaaggtgggatgggcttcagcaaccctgctggtcctaacacccaaacaatttcaaatgccggggcatttacttatatccataactagacattaatgattgaaggcccgcatcctagatgcgggcctttttttatgaaattttttaatatccttttgcaccgctgtccgcgccttataagtggcgtttgatttcggcgcaagcgatagataaatcacgcactgtgttaaatgcacgtcgcattccggtaagccaatcgcctgacaagcttgaaagacgttcattgctaaattcaatgcattgttatcggccagaccaatgtcctcactcgcaaaacgaacgagccgccgagcaatataaatcgggtcttcgccaccgtcaatcatccgccccaaccaataaatcgctgagtcgacatcactattgcgcatcgacttatgcaaagccgaaataatattatagtgttcctcaccgtctttatcataataggcggtttttttatttagcagttcccccaatagatcgccatcgacggtcacttgatggtcttgcacatcactattaataactaacatttctaaaatattcagcgccgtccgtgcatccccattcgaaaagatggcgacttgcttcaataattcatcactgatatgaaccgttaaatccgggaaggcttggggcgcctttaaaacccgttgtagcaactcaataatgtccgcttccgtcaattgctttagcacaaaaacgcgtgaacgcgacagcaacgctgaattgatttcaaacgacggattttcggttgtcgcaccaattaggataatgctgcctttttcaacatacggtaaaaaagcatcctgttgcgccttgttaaaccggtgaatttcatcaataaagacaatcgtccgctcacccagttggcggttttcttcggcttcattcataatcttccgaatctctttgatcccattcatcgcggcactaaacgtgataaatttcgaagccgtcttgcgcgcgataatctccgccaacgtggtcttcccaacgccgggtggtccccagaaaatcatcgaagtcacttgatctttatcaatcatttcgcgtaaaaacttgcctggtccgactaaatgcttctgaccgacaaaactgtctaaatcagacggtcggacccgattagcaagcggcgcattcatcgccatctcttgatcaaacaaagaggtttgtcccattttttcaccccactttagttgttgttaattgaaacttcttaaaatgtgcccgtaaataacttaaggttaaactctccgcgtctgaggcaacaagctcaaatggtgcacccatcgccatcacttggcccccttgactaccacctttaggccccaagtcgatcaggtaatcggcattggtcatcaaatcaaggtcgtgggtaatcatcataatggtggcacccttggattttagctggttgatgacgcctactaaggtttcaacatcgcgcggatgcaagccaacagaaggttcatcgaagacgaataaagtgcccgcccgttttttattcaaatgcgttgcgagttttaagcgctgtgcttcgccacccgaaagactcggtgtactttcaccaaggtgtaaataagctaagccaatttctttgagaatcttaagttccttttgaattgctggcacatctgcaaagaccgggattgcttcttccaccgataaagccaatagatcaacgatgctatagccttgccacttgatggcttcaatctctggtttgtagcggttaccatgacattctggacaggtttcttccatgtctggcaaatattgaatatccaaaataatgctgcctaacccaccacagttcggacaggcgccttctttattgttatacgaaaagtgcgcgatcccataatgatgcacttgtgattctggtaaaccagcaaataatttccgcagattgttcatgatactcgtataagtcgcgagtgttgagcgtgtattcttaccaaccggcttggcatcaatgctgacgactgacgttaaatcggtcgtcaactgggtgacctgctcgggtaattgctcatgttggtgatgcgcttcaattgctggcactaaactatctagaatcaaactcgtcttcccggcgccggaaaacccagaaaccgccgtaatttggttatctggcactttgattgtgacatcatgcagattaaaatattggccaaccgtcatcgttgtctgctcaccagtcgttgcggcagtgactttaggatataagatgttcgctcgaccagcgatatagtggccaatcagggactgtggattctggatcaaatccgcgggtttcccttgggcaatcacttgtccccctttgcgcccagcttctggcccaatttcaatcacccaatccgcttgactgatgatattcacttcatgatcaactaccactaacgaattgccttgtgccactagctgccggaaaatatgaattagcccttcgacgttgtcaggatgcagcccaatcgatggttcatctaaaacgtacaacacaccagttgtcgctgttcgcaacgtccgcgccaattgaatccgttagagctcgccagtcgacaatgtattcccattgcgcgacaacgttaaataatccaaccctaattctagtaacggttgcagtgtttctaataggttcttaaataaaattgtcgccatttgctacatttcatccggtaagtcggccttagtggcacgcacccaatcttctaatgcgcctaacgtcaaattagaaactgctgcaatgttttgtccgccaactgtttgggtcagtaatgccggatttaaccgggtcccatgacacgttggacaggttgaaaaatggaaaaatgaattgactttagccattgcccgatcacttttaaccgattttagcgattcataaacagcgtcataagcattttcatagagggtattctccgtactaaacacacggcccgttgaggtatggaaatcaaccgcatacttcgcccgtttaccatgcaggacaatttctttttccttggccgtcaagtccttgtaagggacatcaattcggaccccaatgtgggcagtaacggttggcatgaaattccggcccggcaatcgccatgaggcaatcgctccgtcttcaatactgagattttcatccgcgatgattttgcgatcatctaacgtttgaatctgccccgtcccatgacattctgggcaggcgccagctgaattaaaggcaaagtcttcggccgatttagccataaactgcacttggcaagtagggcacgtaataatccccattttatcgccagctaagtccatcgcttgggcaatttttagacttggttgaatcacgtgcccatttggacaacgtgtcgtccctaaccgtgaaaaaatcaatctgacgacattaaaaatctcactcatcgaaccaacagttgaccgttctgatggcatacttggtcgttgccgaagtgcaatcgctgatggaatatgccgcacttcttggacttgtgagcgtttattctgcgtgattcggcgccgcgtgtacgtcgacaacgcctctaaataacgccgtgagccttctgcatataaaatccccatcgcaagcgaactttttcctgaaccagacggtcccgaaatcgccacaaattggttcaacggaatatcgacgttaatatttttcaagttattgacgttcccgccacgcacttcaatctacgttggttgttcaattgtcattattggttcgctccccttttgcttgacggttaaaaacggccgcctctgcttctaaattcgctaaaattcgtcctaaatagccgtcaacagctgccacttcagcatccgaaaagcccttgtaaaaaacggcgctcaatcgttgactaacgtcatcaccgacctgttgctgattagcgccttgttcagttaagtcaaagacccgcttgcgcttatcaagtggcgattgctcactcatcaataatccctgttcttctaagcgccgtaacatcaacgataaactactattggctaagccagtcacttgtgccaattccgtagcagtttgcggatgatgatcccacaatgctgacaaaattttcccctgttcagcgttatagcacgcgcgtggatcagccgttaaataacgattaaaaagtcgggtatttaataagcgaatcttcaaagttaaataaccaccctttttggttttcatcccgtccactcctaaattgtttttatatcagcattaattatatcttactatataaaactaattttagcgagtaaaaaacaccatggtcaaccacggtgtttctaaagaagctgtttcaattgttctgcttggacactgcggacttcttcgactactactagcgcctgcttgtcaatcgttgagaccaccggtacgagcgtcgcgagttgtttggccgtacaaatgacatacagcatcggccggtcattttgactatagtacccttgcgctttaatgatcgtgatgccctggtggaattgcgtcgacaatgtttgggcaatcgttgcatattgatccgaaataatcgtcaccgcgcgttttgccccaaatttagccaacaatttattcaaaacgactgctgataaatacaattcaataatcgttaagagcatattttggaagccgataatgaagccggatggaatggcgacaattaaatcaaaaaaaagcatcgcagagccgttttggatccctaaatagcgattggcaatcttcgctaagatcgtactaccagcaatcgtcccttggcaatgaataataatcgccattgcaatccccatcaagacgccaccaattatcgtcggaatgatcgtctgtgtcgtatggtagccgataaaatgcgggagccgcaagaagatagaaatccagagtaccgcccagaccgaataccagatggtttgcttctctaaatacttaaagccgacaatcactaataaaccgtttagaaccaaattcgtagcagctggcggaattgctaacgcatagtagccaatcgccgttaagccagtcacgccaccttcaccaatatgatgaggaatcaggaaatcattaatcgccaccgcataaatcaaggcgccaatgataatcccgagaccatttttaaaaagtgcttttttctgcatcccactcacgtcctcgttcaaactaacataagcgtaccatatttagggtgggagattaaagaacaattgattaactattaatttacaatactctatatttttcctgtgctaagaaaccatttacttactttagaacactctgccagtcattacttgaagcccatccattgtatatacttccacaatgtccctatcaacaatcagcaatacatcatcaacatttcctgtaatttgacgcctttcaattttcgatgttgcccattgacgtctttcaaaatataaccggtcctgatactttttcaagacagcattttgatagatttttattcgcgcgttttataattaagttagccaaatacttttagctaacttgataaaataaaaaacaccaagacaaatctctgttatcattgatgttcctacacaaacaatgaaagaggttattgtcttgatgcaagaacagaataccacagtcagaaaaaaggtcagcacctaacttcgtttgaacgaggcagaattgctacgctgcacagccaaggctattccaatcgtgcaattgccagagcgcttaatgtttgtcatcaaacaatcaataatgaattgtgccgcggcgagatcgaccaagtaaaaaaagtgaatggtcaacgccaatattacgctgtatactcaccagaaacagcacaagctaagtacgaagctaatcgagcccactgtcatcgacctttgaaactcgggtgacgagactgtcgacaacggccacatccgtgccgcgttgaattaattgatcaacggtgtgtgagccgatgtagccggcgccacctaatactaaaactgtcatcttatcattctcctcttcagttgactgattaacctaattttttagcgccatcggcaatttctgccacgtagaaacttggcgcatacccaatcttgtctgtataaactttagcaacattcgtttcaaagttgtcgacttggtctttagcaacaattgcaatcgcacaacccccaaagcccgcaccagtcatccgagcgcctaagacccctggttgttgccaagcggtttgaacgagtgtgtctaattcgatcccagtcacttcataatcaaattgcaatgacacgtgtgacgcattaactaatttgccgaaacgttcaaggtcgttgttcttcagggcttcgcgggccttcattgtccgttggttttcagaaaccgcatggcgtgcacgtttcaacaagttttcatcttgtagcatgtatgtttgtaaatcaaaggtttcgttatctaaatcgcccaatgattgaatatcattcttcgtttgtaaaatggctaaggccttttcacattcactgcgacgttcattatattttgaatcggccaattcacggcgtttattagtgttcatgataataatcacgttgtcttgcaaatcaattgggactaaatcgtaatccaatgtgttcgtgtctagtaagatggcatggttggctttgcccattccaacggcaaattgatccatgatgcctgagttaacaccgataaatttattttcaaccatgacaccggttttaacaaggtcgacacggttaatttctaaattgaattggtcttctagaatcacacccattaataattcaattgatgcggatgatgataagccagcgccgtttggaatattgccttttaaataaatgtccaaaccactgtcgattgtgtaaccttgttcttgaaggtaaacaatcatcccttttggatagttcgcccagttgtgggccttttgataagataagtcgctgaggtcaaatgaaatgacacccgcatcttcaaagttcccagataataaattgattgtttggtcatcacgtttagcaacgactgcatatgtgcccaatgtaatcgcggttgggaaaacatgcccgccgttgtaatcagtatgttcaccaatcaagttaatccgacctggtgcgaagtagctcgcttccggtgctttgtggaatgcgttttcgaatgcggtatttaattctgtcatgttcatagtaaattcctcctttattaatcgctttcattttactaaacatttactaaaaaatcaatcttttttgttaactatcgctttcttttcattggttatgctaaactaagtaatagtaaacattgaattgagaggtgcaccttggcaacgatcaaagatattgctcaactcgctaacgtttcgaatgcaaccgtttcgcgggtcctaaattatgatcaaacactttcggttggcgatgagacccggcaacggattttcgaagccgccgaaagtttaaactatcgtaaaaacacgcgcaaaatgaaccagcaacgcggacgcattgcgattgttgaatggtataccgctaaagaagaattggaagatctatactacctctccatccgacttggcgttgaaaagaaactcaaagaacttggttatgacgtaacacgcttctttcaaaacgatccatttgatacgctccatgatgctacgggtgctgtggtaattggtaagtacagccctgcgcagattaagcgcctaaaaaaactcaaccacaacctcgtcttcgtcgacatgaacacgctcgattgtgaagtcagctgtgtgatgaccgacttcaaaacaccaattaaatccgtaatcaatcattttacaaccgccggcttaactaaaattggtatgttaactggtcaagagagcactgctgataatactaaattgggaccggatccccgttttattcattttaagacgttactcaaagctcaaaaaaactatcaccccgattggattttaaccggtgactttacacccgaatcaggttaccaactcatgatacaattattacaagaccaaagttccgatttaccagaagccctcttcatcgccaatgatgcaatggcagtcggcgctttacgcgccttacatgaatcaggcatcaaagtccctgaacaactcagcctgattagtttcaacgatacctcaatttgccaatacacgttccctactttaagttccgttaaagtttacactgaacaaatgggccaatcagctgccgagttattggttaaacaactcgccgctagcgaaattatcccccaagtcattacgattggcacgacgctgacactacgcaatagttcaaaataataccttcagcccaccgatgatcaattcatctcgtgggtttttatcttgtctcaaatcaattttcattaataggagtatctcttttgaaaacgaaaaaaattagacgaaccatcttaaccattgctatcttggcagtcggttatctcggtggtcgcaacaatgtcttacaaaatgtgttccctgctacagttgctactgagcaaccagctaaacaaacacccccagtcagtcctgattatcaagccattgctgatcaagattttaaaagcggatctgcggcctatctaccaattaataacgatcaaagccaattaacagcaacggattggcaaggtgaaaaaatcgtctatgggcaactcgaccagcttaaccgaacaactagcgtcacagcttacttatcaaagcggaatctgggcaaatcagaaggccggacgcgccaaatttggaatccaacgggttggcataatcaacctctgattgtcaatgaccgccgaatcacaccgcaaaatcgtggccacttgattgcttatacactcacttttaattttgatcagaatggtaactttcaagctggtcaaccgggcagcttagataatccacttaacctcgccacccaaagcgcgtacagtaatcaaaaaacgatgcagatttttgaagaaaaagtccgcactgcgctcgaagcaaacaaaaaagtgatttacaaagtcacgaccgtttttcggggtaatgaactgatgccgcgcggttactgggttcaggccatttccacagatggcacgctgaatttcaacgattacgtctggaatgttgaacctggcgtcgcattcgattacatgactggtcgttctcacttagatgctagcatgcaagtcaaagacggtcagaatattgttgaccgcaccaaacaacaagtcaaacaacttttctaaacaacaaaaagagaggtagcaaccagaataattctagttgctacctctctttttgttagcttatttttccattgccttacgcaatgcagcggctaatggactttccgccggttcatcttcttggttcactttttgaatcaagttgcgttcttcatgtttagaaattttcttcttacgatctttcttgtcgagcatcttttcagttgtcccatcattaagacaccggaagtatgcgccgccttggccttcaataatcaccatttttttgtgacatcgtgggcagcgatggttggaaaccttcggatctttccgacgccgatagtgacagtttgtgcagacataaattttaccgtcacgcgtattgcgttcttttaacggatgatcacattccggacattttttattcgtcactgcaaaatcgcggtattccgtctcactctttttaatctcaccgaccaaggtcttagtggcaccctcgatttcagtgatgaacgccttcggattttcttcgcctttggcaatcgcttcaagcgactgttcccattttcctgtcagttctggtgaaaccaaggtctgattaaccaattttaaaagttgctgaccttttggcgtcactgctaaagcatgaccttgtcgttctaggagttcactacggactaatttttcgatgatttcagcacgagtggctggcgtccccaaaccgtagtgttccatcttcccgagcaacatcccttcagtcaatggcttagggggcgtcgtcaattgttctttaaccgcaaaattagcgcgaactaccatcccttctcgccagtcgaccgtcgcggttggttgcccctctttatcggcagcatgccaaccttgttgcacgacttttgtttgcttaaacgtaaaggtttgatcaccaaatttaacggtggctttcgtaacagctgtcacgtatggatcagcaaacaaccctaagaagcgttccacaatcaagcgatacatgcgcagttcatccgtcgataatttttcggcacgaacgggttcttcagttggaattaaagcgtagtgatccgttactttgccatcattaaagacggctttttgtttgacctgactgccttgccccaagtattgcttagcacgtggatcaaatttgactaatgccgacaaccgttccttcaaagtcccttcgatatctgttgagagatatttcgaatccgtccgtggataactgacaactttatggatttcatacaatgattgaatcaaggataacgtctttttcgcggataagccatactttgcattggccacttgttggagttccgttaaatcatatggtaaaggtgctgattgcgatttctgcgttgttttgacgctgaccacttggcctttggcttgttgcaattgtgcaactaagtcgtctgctgcttggcgcgtcttaatactttgcgggtttgctaattgtaaggcggcttgctgttgatcgaccgtcaagtgaattgtgtaataggtttgcggtttgaaacgattgatttgttgtgccgtttcgttcacaaaggctaacgttggtgtctgcacccgaccagcggataaattatcttcatacttggtcgtcaatgcccgtgtcacgttcaagccaatcaaccaatccgctttgccgcgtgctaacgctgatgcgtacaaattatcgaattgcttggctggttttaagtttgcaaaccctgctttaatggccttagtcgtttgcgatgaaatccagagccgttcaacctgcttatcgaatttaatccattccaaaatatagcgcgcaacggcttccccttcacgccccgaatcagttgcaatcaccgcacctgaaatatctttgcggttggcgaggtgactgatagcttttaattgtccacccgttttaggcaatggctttaaaccgatatgcttgggaataatcggtaagtcttccaaacgccattgttgccattcttttttgatatcctctggtaattgcagcgataacaaatgcccaaacgcccaagtgatgacgtattgatcgccctcaaaataggttttagttttctgagttgttcctagaactttagcaagctctttggcaacacttggtttttccgtgataactagttttttttgcatttaaaattcctcttacttcaattgatcaaaatagtaactgactaatagtataacgcatgttgagaaggaacaacccagaaatcgcgaaagtatcataaataataatatttcaacagccaaaataaaagattctaagaaactgaattcttaggtagattgcaaatttaatccgaatttttggacaaatttgtcagcataacctgatacggtgtttgccagtcgagtattttaagcggtcgctggttaatttggaagttgaaaaatatttgctatactacaattatttattattaggaggtattattttgtccccaaatcaagccttttttctcactgttattggttgcctgttagctatcagttcatcttattttatcgtgcgtctcaatatgctaaagccaacactcaagcaaaatttcttggaccaatatcctgacacggatgaccaagcttacaaagtgcaacaatcaatgaaacaagcttatttcaacgcatccttttacaagcaagctgttcctttaacatcttggttagtccttttattctttttatcaatcggtggctgtctaacagcgctctatctagatgccctgaacattgcaatccgtcttttggggagtgcattcatttttatcgcgtttctctaccttaagttgccgacttttcaagcacagcatactttttggaaatcttatctacaagcgcatcctgaaaatgaattaaaagtcgtcatactcccactcgattcacccattcaacagcggcggattgccttactcaccaaatttaaatgttgtactcttgtagcaggtctcatattgttttacgcctctctttttctataactcaaaaagcggcaccaaccattttatggttggtgccgcttttttaattaacgaatttcaattgggttcgttggttggtctgattcacttaacttcggtaacattaattgtaagacgccatcttgatattgcgcatcgatttgatcccggttgacaccaggtaggtagaattgccggctaaagcgcccataatgccgttcgctttgaacgatattgccttgactgtcactatgatcagcgaaactatcacgtttagcactaatcttcaatgtattatcttgataatccacgtgaatatctttcttgtccagtcctggtaaatcaaccgctaattggtaatccttatcggtctctttaacatctgttttgagtaagttgtccgtttcaggcgacattgccaataattgctgaccgaaattcttgaaccaatcatctccaccaaaattatctagccaattttgacgaccattcattaattcgtttgccatctctaaaacttcctttcttaatctttacaactctattctagtccgttaatcatgaaatgcaagtaattagcattcgctgttgttgagtgccaatttttaaactagaccactgatttttcagctttttgatacccgcctaatatggttttgtgctatacttaaggttccaaaaatattcggaggtaggttcatatgaaaattgttgtcttagcgggcgggcgtagtaccgaacgtaacgtttcattaacgtctggacacaaaattaccaatgcattacaaacgaaaggccatgacgttgctttcgttgatcttttcttaggaaatgatttgcacgacgtcgcatcaatcgatgatctttattcttcaacacctgttgaaaaagattacgacatcagcgacgaagttttaacagacgacgccatcaacgcattacgtactgatggttcaacacaactctttggcccgaatgtcttagagatttgtaaaactgctgatattgtcttcctcgcacttcatggtggcgatggcgaagacggtaaagtccaagcggttctcgatctctttggaattccttataccggtagtgacacactcgcagcaggtattacaatgagtaaaaaggtttcaaaggaaatcttattatataaccaaattccaactgctcggtttgtcgctgcttatcgcgaccaacccatgccagaaatcccatttgagtaccctgtcgtggtaaaaccaagtaacggtggctcaagtgttgggacgcatatcgtgcacaacgaagctgagttacaaccagctgtcgaagatgcgcttcgtttcgaccgcgaagctttaatcgaagaattcattaaaggtcgcgaattctcacttggcgtgattaatggtcaaccattacctgccattgaaatcgtcgttaatgacggttggtatgactttgagcacaaattcgtgactggaaataccactcaatttgtcacaccaccaaacgatttacctgatgatgtacacgaagccatgaaacaaatggcacttgatgctatgcaagcacttggcttaacgaactacgcccgcatcgacttcttctggagtcctgaaaatggcttacacgtgatcgaaggaaatacattacctgggatgacgccactttcattaattccacaagaagcagaagtgcttggtatcagttatcctgatctttgcgaaatgattgttcaaggtaaattagaactccttaaagcaaaatagccaataaaaataaccctatcgacgattttcagtcgacagggttatttttatttggttcatttaaaactgattacttagttcctgattaggaactattcttaaaaaaacacgtcgcttggaattcccaagcggtcatgtagtaattgaatttctttgacggtaaatggaatcttccctctaatcttacgattagccgtcgttaatgttttgcccaatacatcagcaacaacttgctgtttcaaatcatgaccctttaaataacctgatagaacaaataatttttctgccacattcagcacccccaagaaacgttatcaatcccgttccacattaggaatattacgataatgtaagaactctgtcaattaaaaactttagtcccaagtgttcacttattgacgtcatttgtcatataattaaacttataagtcaaacgcgtgataaaggacggtgctaaatgttcggacaattattacacgataagcgaactgctaagaatctaacaatgcaacagctcgccgatctactcagcgcaaaatataataccaagattagtagctcaatgatcttccggtgggaaaaaggcgctgccccatcactaaaagcattatttattgttgctgtcgaattgcaaatcgaccttaaccaattggccacccttgttgcggattctaaccgcgtcaattagccgcttttttttgtttttttcccgatttttgaatggtcttcacacctagtacatctaaaaagaacgtaaagattggtaatccaacaattaacccccaagttcctaagaaacgttctgctacaaataaaacaacaaatgtaaagaaaattggcagctgtgttttactcgacataaatcgcggattcaaaacatatgcttctagggcatgaatgactaaaatcatcaccaatatataaaccacatactgaattccgccgactgaaaaggcgataatgcacaatgggatacatgaaacgatgactcctgcgaccggtaccatcgacaataggaaaatcatgatggctaaactcggaatattaggcattttcattaccgttaacgtaatcgttgttaacactgtattcacaattgcaatgaagatttgggcttcaattaccacgccaaaggtattcacgaattttttagcaaaatacatgatatcttggaagaaccagccgtaagtactcttcaaaaagagttttccaaactgcggtaatcggtctagctcaattgtgtaaaagaaactcaaaataaacgataagacaattgtgacgcccattgttccgattccggtgatgtaattaacgattgttgatacaccgtgtttcaactgatccgtcaagttgaactgtttcatgtaatccccaatggttcgcataaattgattcgcatcaaatgatggactttggtagaaattatagacactctcgcctaatttaattgactgtttagcaatctgtggcacataaatcgttactgctagatacactaaaaaaatcaccaacatataaagcggcacaaccacagctgcgggcggaatttttgaatactgttggacctttcgtactaattgagtcactaaaaaagtaaagatgaacgtcagcaaaatgatattcatcatcgagcgtgacacatagatgaccccaatcaacgttaagagcactacaactcgtcttaactgctgattcgtcacaaatttttgatataaactcacgcaatttcctcctatggcaattctatatcattattttacaacacttcgaactaattggatattctggaattccgatagttgcaacttacatctttttaaaaatagtcgtatactactctggtacttcaaatttacacctagaaaggattttcggtatgttagaaaaaactttttataagaaactactacaacactcttttgatttccctgttaccgtcaactattgggacggcagctccgaaacctatggttctggagagcctgaagtagcgattacttttaaaaaagcgattcccatcaaacaattgtccagcaacgcatcattagccctcggcgaagcgtacatggctggcgaccttgaagtgacaagtaatacaacagataccccacttcaaaaactattaacggcggcttacactagcgcagacagtttcatgcgtaatagtcgctacattcatctgattccaaaacaatcgcattcagaaaaggcaagtaaaaaagatatccaaagtcattacgatttagggaatgacttctaccaactttggttggataaaacaatgacttactcatgtgcttattttgaaaaaccaactgatgatttagagacagcacaaattaataaagtgcaccatattttacgcaagctcaatccacaacctaaccgaacattgctcgacatcggctgtggttggggcaccctcatgttaaccgccgctaaagaatatcatctcaaagtggtcgggattaccttgagtcaggaacaatatgatttcgttcaacaacggattaatgacgagggccttagcgatgttgctagcgtccaacttgttgactatcgcgaactcaaacacgccccattcgattacattaccagtgttgggatgtttgaacacgttggtgaagaaaatcttggtgcctacttccaagatatcgctgactacctcactgatgatggggttgccctccttcatgggattacccgtcaacaaggcggtgcgcgcaatgcctggattaataagtatattttcccaggtggctatgtacccggtttagttgaaaatacacaacacattatcaatgccggactacaaattgccgacatggaacccctccggcgccattatcaaaaaacgctggaaatctggactgctaattttaacgcccaaaaagacgtcattttaccaaaagcaggtccagaattcgtccgcatgtgggatctctatctccaagcatgtgcctcatcgtttgaatctgggaacattgatgtcattcaatacctcgtatcaaaaggccccagcgcaagagacctcccaatgacaagagaatatatgtatgattagagtgctgactgtcgcgcttagtcattgagcattaattcaaaaataacataaatccaggttttaggatttatgttatttttagattaagcggaaattactgcgacaggaagcacgtttagagtgctgagtcgaacgggttggctttgaggattacccaaaaaagacccgctaattattaccaagtccagttgctgcgcgtgccggcgggtcttcgggtggctctggtggatccggtggtagcggtggtgggtcttcaccgacatccggttatgttggcggccgtagtcgtgattattattacgatgatgcgggatatcggcattactacaagtccccgatgcgtcgtttattcgatagtatagtcaccctgcttttcgtatttgtctcccttgggatcatgatttggcgtaaagtgcgtgactggttaaccggacgtagaaaacgggctctgtctgataccctgccgttagatgctgaaaccgcggcgcactttgaaaatgcattctatcaaattgaaacagcttggccctcaaatgacttaagcgacgtggcagacttaatgacaccccattttcagcaccaacaacaacgcatcttaaaccgttatcaacggcaccacaaacataaccaacttgagagtatcgccattgtttcaactgagttattattacctgaaaaaccgaaccgccaagatattctagtgacagcgcaaatgcgcgattacttcactgatgagcggcaaacagccacggttaatgaccaacgtcgtgaagcggcttatattgaacgtttcagcgaaatttggacatttagattaattgatggtcaatatcgtgtcgctcatattaatcaatccctataaaagagctaccagttggtggttcttttttgttatttaattggttaagtttattgcgttaaacaactttttctcttaaaataaaccttatcgatttaaaaattgtttatccattttgattagaaagtgaggtcatttgatgaccctccatgttggcactggccagacacaaacggccgtttccttaatgccgcgtaacctagacgattgtgtgcgtgaaatggcactcgttgagcaaaagcaagctgcgattgatattctagaatggcgcttagactattggcaaacaccagcgaccttattaacggctggtcaccaaattgccgcttgcaagcaccccgttattttaacgctcagaacaacccatgatggcggcctggctgatccaaccgactatttagaccgctatacagccctattatcagctcaaatcggcgatgtagttgatattgagtggtctttacctgaggcagttagaaaagccgtcagcgcgcttgcacgtgcgaatggctatcaagtgttactaagccatcacgatttaaagacaacctctgataatctaacacttcaaaaacaactcgcagcaatgcatgcgacgcacccagatatgttaaaactagcaactaccgctcaaagtaatgaggatactactcggttaatggcgattacccagtcttttacacatgatcacacaaccccactaatcacgatggcgatgtctgaatttggcttagcctctcgcatttttggtggtcaattcggttcagctgtgagcttcggttaccttgaacaccccagtgcaccaggccaattacccattgaacaactcaaaggcttgttgacaatgcatcaaaattaaccgcacaaaaaagccccgcacaaattcaatttgtgcggggctttttagattgttgattagttccgttcaacgtttaaatcattcatcttaagcattgtatcaacggccttttccattgtttcgattgaaacaaattcgtagcgaccgtgcatgttttcagcaccagcaaagatgttaggggttggaatacccatgaatgaaatcttagaaccatctgtcccaccacgaacaggttcgattaatggtttgatatcaacggcttccattgcatctttagcaagatcaacaacgtccatgtgatcttttaagacttctgccatgttgtagtattgatctttgattgttgcaacaacgcggccttcaccgtatttagcattcatttgatcagcaactttagcagcaaatgctttgcgttcttccaaaccatcacgttcgaaatcacgaatgatgtaagccatgtgtgcttcatcaactgtgccttcaaggcttaataagtgatagaaaccttgacgaccgtctgttttttcagggacttcatcgcttggtaaagcattttggaaatcaacagccacttgaagggcattgatcatgatgtttttagcttcactaggatgcacgtttttaccttgaatatcgactttcatggcagcagcgttgaatgtttcgtattcaagttgaccgattggaccgccatccattgtgtaagcaaagtcggttgcgaaatctttggcatcaaagtaatcagcgccagttccgatttcttcatcggggccaaaaccaatcttgatgtcgccatgtttgatttcaggatgttggactaagaagtccatggctgtcatgatttcagcaaccccagacttatcatctgaacctaataatgttgagccgtcagttgtgattaaagtttggcctttataatttttcatatttgggaattctttaggatctaatacgaatttacccgcatcatctaatttaataattgattcgccatcatagttttcgacgatttgtggattgacacctttggcattgaagtcggcagtatcaacgtgtgataaaaagcccattgttggcacttttttatcaatattacttggtaatagcgctgttacatagccattactttcgttgtatttcacatcacttaatccgatttccttcaagtcgtccatcaatttgtgtaaaaataccacttgtgtttgggttgatgggctcgttgttgcgttttcatctgaacgtgtttcagttgtgacatattctagaaaacgaggaatcaatttttcatatttagccatggtgtagcctcctagatattatttaatactaattctattctaacctacttcgcattaaaaataaatgtaaacggatcagttttttgctgtgatttaatgaatgtaaccgaccaaccacgctgtttggcccacttttcaaaaattcctgtcatcttatccttcacaatactttcgacatgatgaccaggatcaattactgacaaaccagctgccaacatatcgtgaccagtatgataatacacatcaccggtaatgtagacatccgcaccagcttgtaaagcggctgggaagaatttacccccatcgccaccgacaacggcgactgtctgaactattttgtccggttcatttgaaattaagcgcagacctgttaaatcaaatgtttcgcagacaaattgcgcataatcccggaccgtcattgattgagcgacttgaccaatgcgcccaataccaatcggttgttgttgattagctaatggaatcacatcataaacgggttcttcataaggatgcgccgcaagcatcgcttgaacaactttggtttgcatggccactggcagaacaacttcgattttaacttcggtaaccgcttctagatcacctgattggccgatataaggatttgctgcgtccgttggttgaaaacgccctattccggtcgtactaaaactgcaggcttgataatcgccaatatgtcccgcatcagcttgattcaatgccatccgcatctgttcagcatgtgactcagggacaaagaccaccaattttactaatgattggtagtccgtgatgttaaacggttgcacatcgtttagttgtaaagcttcagctagccaatcattcatgccgccgttagtcttatccaaattcgtatgggcggcatataccgtgatgtcatgcgttaacacatccgcatacatcttgttttgcggatcacttagatcgagattccgcgctgggcgaaacattactggatggtgggcaaaaataaaatcaacattctgttcaatcgcttcttgaacggtttctgggcggacatcaagggttactaacacccgttcaatgcttttatcgcgtcgcccgatttgaaaaccggtggggtcattgccttcttttaatgccaatggtgcgtagtcttcaatcgcagcaattaagtcactcgcgactaattttcccatgttttcatctcctcgattaatgcaatttcatgttcaactgctttgactttatcagtaggtacgacttgtgcgttttgtaattgttgcaataaatgacgccgttttttcaacattgtcccccacttcaattggaaatcagcaggttgtgtttggcggagaacagggccaaacactcgatcactttcgcttaatggtgcaactgatggttggggttcgccgacaatcacttcgtagatatgcccgtcttcagcgacaatcgcttcatcaacgattgcatagtcatgtgcattcaaccattcacggacagtactttccatgatattgggttgtaacacgagtcgttcatggccgttcagatgatccaatccacgggttaaaatttccgtgatcaataaaccacccatgccggcaatcacgatgcaactcacatggtcttcttcaggattcaatacctcgacgccatcgcctaagcggacttgaatctgttgttgtaagtgccattgattaacgtgagtctgtgttgattcaaacggaccggcaactacttcaccggcaatggcgcccttcaaccggttttgttccgtaagccaaattggtaaatatgcatgatctgaaccgatatcagcaacaatgctatcttgtgggacaaactgcgcaaccgcagctaaacgctttgataaatgaattggtgacaaaaataaaactccattctagaaactttgattgttatagttagtataccaaattttagacggcatacgcagtcaaagtgaacacttgattctggatagcagaagttgctttaggcaaaatttagttttatactgaaattaaatcgaaaacgctttctatacattaaggagtggtctcatgagttggttgcaactattctgtgttttcatgattggtttaggcatttttcaaatttataagtcgtatcagtattatcaagacttaaaattatacgcagatcaaaatacttctgtctttgcgccagcagcgctctgttcgagtgctttcatggggcttgtctttattgggattagtcttgctagtttattgaattggttataaacgtcaattagccccttctttttgagctttattagttttcggaaatcctagttaacataagataaattatttacagtgaaggggatggtaacatgaactggttaccaattattgggattttaatgctaatcatcggtgttttccaactttcaatgaccattaaaacattcaagactttgaaggttgaagcaaaccacagtacttcagtcttcatgcccatggcgttatggtcaggtgcattgatggggattgtatttttagcagtggggattggtgctctgcttgtttagatacacgcaaaaaaggccgcaagctaggttagcttgcggcctttttattgattgcctaaacgtgctttttagtagtataaccccaatcaatagaacacgctcattgtccataaaaaaaagcaaacatatgaaagcgattccgattttttagagtacgaaaaatagccgtcaaacaacgtttgacggctacctttgcagttgtattttggggttatactatatgatctacattcacgaagaacccagtaacattcagtatagatacaaaagccttcatttaatttttggaacgtctctagtcagtaacacgtgctaagaagtaattcttcttcccacggcgaataatcacaaacttgccatcaaagctagtcatcgggtcaatcatcgcatcagtttcttggatacggtcaccattaattgtaatggcaccattttgaacatcttcacgtgcttgacgttttgaagattcaatacctgtatccactaagaagtcaacaatgtttttagcttctttactaatttcaactgatggtgctttaccaaaagcttgttctgcttcaacaacatctaaagctttgatattaccttcaaaaagtaattcagtaatatgttccgcttcatctaatgcttcttgaccgtgaacaaaacgtgtcacttcttgtgctaaacgtttttgtgcttcacgtttttcaggttctgttgcaactttttgtgccaattcttcaatttcgtcttcttctaagaatgtgaagaatttaaggtatttaataacatcacgatcatcttgatttacccagaattggtagaattcgtatggtgaagtcttttcagcgtcaagccagattgcaccacctgctgtcttaccaaacttagttccgtcagctttcaacattaatggaattgttaaaccgtatacgggttcgtcgctaccttcaagtttatgaatcatatcaatccctgaagtaatattgccccattgatcagccccaccaatttgcagttggatgttatgttcatcatgtaagtgtttgaaatcaattgattgtagaatttggtatgtgaattcagtaaatgaaatccccacttccaaacgactagcaacaatatctttagctaacattgtattgatgttgaaattcttaccgtaatctcttaaaaagtccaacaatgagatttttgataaccaatcgtagttattaacaaaagtaacattggcatctttaccaaataatttccgcatttggtttgataaagcttcaatatttttttgaaccttttccattgtttgtaactggcgttctgaattacgaccacttggatcaccaattgatcctgtcccaccaccgattaagatgtatgggtgatgtccagctaattggaatcgcttcatcatcatgaatggaatcaaatgaccgatgtgtaaactatcaccagttggatcagccccacagtataaagaaatcttgttgttttctactaattcacgcaatccttcagcatctgtttgttggttaatcgcatcacgccatgttaattcatcaataatattttttctcatcaaaatttcctcctaaattaaaaaagtcccagcaatctttaataaaataaagattactgggacgaaatgtcattttttcgcggtaccacccgtgttatattttgaaagtgcactttcaaaatatcactctagattttaacgtaaattcaacgtacgatttgataaaacaaaaagtgtaattcgacttagaaacatatgtcaggtctcaccaaatcccgactctctgtaatagtggttactaattctactgcgcttttcaatcgctttattaacttatgtgcttatcatagttcacatgataaatgaagtcaacacttttatgctatttttttataaacatgaacgattttattctaatttaaatttaattaaattagaatagtcgtatttaattcctctaaattaaagttttacaacattcgcagcttgtgctccacgtgtgccttcaacgatgtcgaattcgaccgcttggccttcttctaatgacttgaagccttcgtcttggattgcactgaaatgtacaaagatatcgtcttgaccttctgctgagataaagccgaaacctttttcattgttaaaccattttactgttcctttttccatgatgttactccttttaaatacacaattattatctagccaccagaatcggtcatctaaacaagtcaattatacgcgattttgtaaccgcatgcaagcgtaaaataaattaattgagtttatatcgggtccgccgttgatattgttcgccaggatgcaaaacaatattaccaaactcggtatgatggatggcatctggcatcatttgggcttcaatcgccactgcttggtggggttgaattgcctgatttgttaagtttggttcgtccccgaagccattggcggtataaataacgattgcattcccttctgtatcaattgtgatcgagcggccactttcgggatcgcgtaaaatcgcatccgattcacccggcgtttgattcaacaggaatggatgatcaaaaccaccgaccaatttagtttgcgtattttcactatcaaaagcggcttgcaaagctcgcggttgacgtaaatcaaagacagagcccgcaactgggactaattccccggttggtaagccgtctggttgaatggcaccaaaacggtcactatcgatttgcaatgtgtgttggccaacaaattgatcaaagtcccccgtcaaattcagatagacatggcatgttgggttaaacaacgtggttttatcagtcgttgcttgatagtcaattagccattcattggcctcatttagcgtatacgtcgtggtcaccgctaaattaccggggaatccattttcaccatctggactcgttaacatgaaaacgacactaatcgcatcatctttttcaaccactgatgattgccagatttgcgattcaaaactattggggccaccatgattcgtgttggcgccattattaatcggtgcttgataatcatgaccatcgagtgtaaaagcaccttgaccgatgcggccagctacgcgtcccactgtcgcaccaaaataagcttgttgctttacaaaatccgctagggtgtcatagccaatcacaacattggccatctgaccactttgatccggcatcaccaagtgagtaatcgttgcgccgtattctgtcacggctaattgatacccctgacgattctctagccaatactgccaaaccgtttgaccatttatttctccaaatgcttctcgccaatacttcatgaatgtccctccttataggttaaacatgttgcgtaaatttaataaatgctgcctgaccttgttcgttgcatttgaaaacaccagcgtcttctagaacgcgcatgaacactttgccgacttcagtccgcactaattccgttacgttatctgatgtaatcgatgtgttagcggctttaatcgtatctgcccattcttgatggtaagcggccatctggtttggttgatcgcagagatagtgttcaacctcagccatttcatctttgagtcgtggtggcaaaattgctaagcccatcacttcgattaaaccaatattttcttttttaatatgttgcacatctgcatgtggatgataaattccatctggatgttctgcagacgtttgattgtcgcgtagtaccaaatcaatttcgaattgaccgtctcgcatccgcgcaatcggcgtaatcgtatgatgtggtgtgccgtcttctgagtgggctaagatttggacacttggatcgctgtaattttgccaactagttaaaatttgtgcagcgagtgtttccaaatgcgttgcattcgcactcgtcaaacgaatgactgacattggccacttcacaattcccgcctgaatatcattatacccgttaaaatgtagtggtgtctcgattggcgccttagccattggaaaatcgtgacgccccccttgataatgttcatgggttaagatcgaaccaccgacaatcggtaaatcagcgttactcccagcgaaatagccggggaactgcttcacaatctgtaataaatttttgaaggtcgtttcattaatcaccattggttcgtgttgaccatcaaggaaaatcgaatgctcattaaaataagcatatggtgaatattggaagccccaagtctgacctgccaattcaaaacgaatgatgcgatgattacgccgtgctgggaaatctaaacgccccgtatacccctcattttccagacataattgacatttggggtagccggtttgtttcatcgttttggctaacgcaatttgtttcggatccttttccggcttcgataaattaatcgtgatttctaagtcgccatagtgcgtcggcacttgataagcgatatttttcgcgattgcggccactttaacgtagtcgttggcccgacttaattcataaaagtcggcaagtgcttgttggggatcactctcgtattgatgccaaaaatggcggttcaccgcacttggtaatggcgtcaccaaatccatcaacttcgcccctaaaatatcttgttctgccgctaaattctcaatccggctattcgcaactgcaagacgcaacaatgcgtcctttaatccgatgagactttgatcagtcaccgcaacgttactgtcctcttcaccaacaaggtctaagacgagattaaataagtactgttggtcttctgctttataaagtgtgtcttgaaagataatcactttttcaataaatgtttgaatcaattctcttgcttgcatatgctttcctctaccgatctgcgtatcctgctcatccaggtaatatctgaatggttggctttttttaattaagtaggttggacaatctgcacgttggcatttaagacaccggcagaggggatgtcacaatttggcattgcgacgtctaattgttgtgagttagaagcggcaaatgttccggtgtcgttgacaacacggtaccatacttcaccggtacttaatgtgatcttgatttgtgagccgcgggggataacgcctaagtgcgcagcaaccccggcatacattccgccgggcatgcttgttgcgccaaggaccgcgggatcgtaaaaggttaatttgaatgtccctttgtcaattaaggttggttcggcaggtgctggggccgcaactggttctggctcaggggcgggcgttggttccttaatttctgcggaatcaggatctggatgaatcggacagctaacgggtttgtctgttggtagaacagttgcgtgtttgaccagtgacgtttcagttgcttgggcaggttgccccgtgaattgttcaatggctttagatgacatcagcttttggacagggtggttcgtttctggtgctgcttcattggttaatgcggcacgcgcgatattcgttgtaattagcatcagcaatataaggccgatagctaaaaagaatggtttgtttttgataataaagcgtcactcctaggtaagttttggaactaggagagtatatcaatgctgcatgtcaattaaatagcagtttctttacagaaatggggtaatttgtcatgttagtcatatgtttgtaaaatttaggagcttaattaaagggcgtcacgatggcgttgatcggcagtaagacgcgaatgggaatgctatcatgacgattactgttaaaatgacaaaaaacagggcaactatcgtaaagatagttgccctgtttttaagaattagatgaggaaatagccgaatacccctaaaatgattaagaataagaagttcatgccagtgaaaacgacgaggaacttaccaaggtctttgccccagcctttcttgaatcgtttgtaagcaatcaagtttgcaagtgaggcaaacattgtgccgaccccaccgatattgatggctaagaacattgcgtggctgtggttggtgaagcttgaaagtaaaatttcagttgggacatttgcaattaattgacaactgataatcccggtgatgtaggtttgttttgctgttccgacaattgatcgcatgaatgtggcaatcgttgggatgtgacttaaattcccaacagcgatgaagaaacagaagaatgtgagtaataagccgtaatcgactgttttgaataacttaggatcaaacgctagaatcgcgataatcactagaattggtgtcacccataatggaattaatgagaacactgcgaggaaaacgacaaccgttaatggaacgaaataccacagtggccctttttcaacttcaacgggatgtaacccgtgaagtttgatgggttcttttggaaagaggaaggtcgttgctgccaacataatgacgctgacaatcaagacgggaattgaatattcgaagaaatggcgaatcgtcatatggtaaaacgaaacaaggaaaatattatgcgggctcccaaacggtgttaatgaagaaccgaggttagccgaaatcgtgatgagcgtcaccggtaagattggtgaaaattcaagttgacgcgcaattaagatgaataacgggacgaacgttaataccgtcatatcgtttgttaagaacatcgcgccgacaaacgttagtgctaataacatctgcatcaaggctcgtttggaacggcttttgataattaattcgcgagcgaagtaatcaagcacgtggagccgttgataaacttgaacgagcgtcataatacaaaagacgctgacgatcacgtggaaattaacgtaactaagttgtgggcggttgaaaaatgaggtgacaatggctgcgatggcagcggctaagagtagtttgtcatctaagaaaaaatctcggatgttcaaagcaatgtttttcatatagattcaattatccttcttaatatagttatattattcaaaaaagcactactacaattctagactgtttacggggataaaaacagaaaaatttacaatatatacacaatttttacaatacatagcctcccattctagtaaacgcggttgactgtctcgcttgacgttagcggtttttaatttgaagaattaagtgattttactgcttatcgcggctaaaattaggtataatataaatgaaatgtaaacgattaatcattattaagaaggtggagcagatgaaagacgccccaagacatacaatcatattaggaatagtggccacggtcattgcgtttatttgtggcatgttagttttaaagacgattttgaatttcaatttatggcttgcgattctaatcagtgcagtactaggcttatatgtcgggtttaatgcattctatagtacgtatttagcagaaatgatcaaaattgaagtggctaatcaaggattaacaagccaagacttagcgacaatgatgcatggtagggctaaggattatccaattgtccgcggtgaattgcgtctaatcatttctcggcgcaaacgcgcacagctgttagcgaagttgcgtgcacgggttagctaaggcttttgcatgaacgattgttctatgttaggataggactaacttattgaagggtgcgattacatgttaattgaacgaccattaattatgaagcttcgctctgtatatttgaagatgacgcatcgtgcagagcctaatattgattaaaagtcatctataggacattactggatttaacgactggtgacagtggtttatttgggtagtgactatggatggagtggtcgatagtcaatgattgtaatcatgacaggggtagcggatgctgcccctgttttttatttggaaagaaagtaggaataaaacaatgagtattttaaaagtcgaaggcctaacacaacagtttttagataaacaactttatgacgacgccgggtttcaagtgaataaaggcgaacatatggggattaccggccaaaacggggtgggtaagagtacgttaatcaatatcctcacgggcgtcattcttccggatgaaggaaaagtgacgtggcaaaagaatttgaagattggttatctcgatcagtatgcgaagttagcaccaggattatcgatctttgaatttttgaagacggcttttgcggatttatataagaaagaaaaattaatgagtcaatattatgcggactatgcagagagccttgatgaccaattgctcgaaaaagcgggtgcgattcaagaactattagaggcaaaaagcttctatgatattgatacgcgcgttatgcaagtggccactggcttggggattgatgcattagggatggaccatgatgtatcacaactaagtgggggccaacgttcgaagattattttagcgaaactactattagaagaacccgatatgttattactggatgaaccaacgaactatttggacacgaaccacattgattggctgagtgattatctcaatcatttcgaaggcgcctttatcacaatctcccatgattatgactttttggaacgggtgacaacctgtatcgccgatatcgaattcggtaagattacgaagtataccggcacactacaacaagccttccggcaaaaggaagagaataaggctagttatctaaaggcttatgagaaccaacaaaaaaagattgaaaaaacgaaagcttatatccgcaagtataaagcgggctcccgttcgacaattgccaagagtcgtgagaaacaattggcacatatggatattttgacgccaccaagtaatcgcgtgaaggctaacttccgctttccatatcatgcaacggccagtcagattctattgacgactaatgatttggagattggttacgatcgcgcgttactaccagcgttgaacttttcaattggtcgtgatcagaaggtggtcttgaaaggttttaatgggattgggaaatcaacgttgattaaaacgatcattaaagaaattccagcaatcgatggggactttgagattgccagtacggtgaagtttggttactttaaacaagacttgaagtggccgaataatatggtaacgccattacagtatctacaaggcgaataccctgatcagaaacaaaaggaactacgccaagttttatcgcggactggtttaactgccgaagaagcgatgaagcctttgaaacaacttagtggtggcgaacaatcgaaggtgaagattgccgaactactattaacatcaagcaactttcttctattagatgaaccaacgaaccatttagatgatgatacgaagaatgcactacgaaaagcaatccaagccttcgagggtggcgtactccttgttactcatgaagaagacttctatcaaggtgactggattgataagattttggatgttgaatcactcattaaacaatagggataccgtagagctttgaagggttattggtaacgatgaaacgttgctggtaacttttcaaagcttttttaataaaaagcttgaccgcgcctgttaatcttggtaatatataaaagttgtctcgacgagggacgtatggttgatgactcagcgatacgaaataaaaaagattttaaaaaacgcttgttatttaaatcttatcgaaactttgttctttgaaaactggataataagtaatatattagttttaaaagccgagaaaacattgcgttttaaagagttttttaatagaaatatgaattagttcatatcgctaaactcaaataataaccctttaccgtaggtaaagttaggttaagttataaagggcgcacggtggatgccttggcactaggagccgatgaaggacggtactaacaccgatatgcttcggggagctgtaagtaagctttgatccggagatttccgaatgggggaacccaatacctttagtcgggtattatcattaagtgaatacatagcttaatgaaggtagacgcggggaactgaaacatctaagtacctgcaggaagagaaagaaaaatcgattccctaagtagcggcgagcgaacggggaagagcccaaaccaagaagcttgcttcttggggttgtaggacagaacattggagttaccaagttaagttgtaatcgaatcagctgggaagctgagtcaaagagtgtgataaccacgtagattaaacaacttaacctccgttctggatcctgagtacggcggaacacgtgaaattccgtcggaatccgggaggaccatctcccaaggctaaatactccctagtgaccgatagtgaaccagtaccgtgagggaaaggtgaaaagcaccccggaaggggagtgaaatagatcctgaaaccgtgtgcctacaattagtcaaagctcgttaatgagtgatggcgtgccttttgtagaatgaaccggcgagttacgtttatatgcgaggttaaagtgaaaagctggagccgtagcgaaagcgagtctgaaatgggcgagtgagtatatagatgtagacccgaaaccaagtgacctacccatgtccaggttgaaggtgtggtaaaacacactggaggaccgaacccacgtcagttgaaaatggcggggatgaggtgtgggtagcggtgaaattccaatcgaacttggagatagctggttctctccgaaatagctttagggctagcctcggaatattggatcatggaggtagagcactgtttggactaggggcccgtcatgggttactgaattcagataaactccgaataccattgatttagttccgggagtcagactgcgagtgataagatccgtagtcgaaagggaaacagcccagatcaccagttaaggtcccaaaatttatgttaagtggaaaaggatgtggcggtgcacagacaactaggatgttggctcagaagcagccaccatttaaagagtgcgtaatagctcactagtcgagtgccgctgcgccgaaaatgtaccggggctaaacataataccgaaactgtgggtggacacgtaagtgtccgcggtaggagagcgttctaagggcgatgaagctagatcgtaaggactagtggagcgcttagaagtgagaatgccggcatgagtagcgaaagatcagtgagaatctgatccaccgtatgactaaggtttcctggggaaggctcgtcctcccagggttagtcgggacctaaggcgaggccgaaaggcgtagtcgatggccaacaggttgagattcctgtactagtttattttgtttgaacgatggagggacgcaggaagctaaggaatgcacacgactggaaatgtgtgtctaagcaacaagtcttgagttgagtgaaatgcttgattctttaaggacaagttgtgatggggagcgaaattaagtagcgaagttcctgatgttacactgccaagaaaagcttctagtgagaaataaactacccgtaccgtaaaccgacacaggtggtcgaggagaatatcctaaggtgagcgagtgaactctcgttaaggaactcggcaaaatgaccccgtaacttcgggagaaggggtgctgaccgtcaggtcagccgcagtgaataggcccaaacaactgtttatcaaaaacacaggtctctgcaaaatcgaaagatgacgtataggggctgacgcctgcccggtgctggaaggttaagaggatgagttagcgtaagcgaagcccagaattgaagccccagtaaacggcggccgtaactataacggtcctaaggtagcgaaattccttgtcgggtaagttccgacccgcacgaaaggcgtaatgatttgggcactgtctcaacgagagactcggtgaaattataatacccgtgaagatgcgggttacccgcgacaggacggaaagaccccatggagctttactgtagcttgatattgagtgtttgtacagtttgtacaggataggtaggagccgtagaaatcggaacgctagtttcgatggaggcgttggtgggatactaccctaactgtatgaccactctaacccgcgccacttagcgtggcgggagacagtgtcaggtgggcagtttgactggggcggtcgcctcctaaagtgtaacggaggcgctcaaaggttctctcagaatggttggaaatcattcgtagagtgtaaaggtataagagagcttgactgtgagattgacaaatcgagcagggacgaaagtcggacttagtgatccggtggttccgtatggaagggccatcgctcaacggataaaagctaccctggggataacaggcttatctcccccaagagtccacatcgacggggaggtttggcacctcgatgtcggctcatcgcatcctggggctgtagtcggtcccaagggttgggctgttcgcccattaaagcggtacgcgagctgggttcagaacgtcgtgagacagttcggtccctatccgtcgcgggcgcaggaaatttgagaggagctgtccttagtacgagaggaccgggatggacatacctctggtgtaccagttgtgccgccaggcgcatcgctgggtagctatgtatggacgggataaacgctgaaagcatctaagtgtgaagcccccctcgagatgagatttcccattcctttatggaagtaagacccctgaaagatgatcaggtagataggctaggagtggaagtacagcgatgtatggagcggactagtactaatcggtcgaggacttaaccaaaggtgcaatgttaggcttttgaaatgaaatattacttattatgcagttttgagagaacgaagttcttctcagtgcgcaagcacaaaatagtgtggtggcgatagcaagaaggatacacctgttcccatgtcgaacacagaagttaagcttcttagcgccgatagtagttggtgggaaactacctgcgaggataggacgttgccgcgctatacacagttttttgtggctatattatctattaaacccttgatattaatgaatttttaatcacgcaaaagaacaaaagattaaaatatataagataaatatataggcttcgcctattttttatttttttcaaaaatttaaagccaaaggtcaagttcaaaaccaaaaccatttaacaatttggatacggacaataaacaattctcattgtatttgtaaatatacataactttaggtactgcaagctaccacttcgtggtacattctccgaatgtacctctcgttactcgcaaaggggttagggcacagccctcccctttgaaccctacaccagccgagcacgttgtacccgcactctctctcaatattccacaggaatgttgagcttacaaaatcaagggcacttgcacgttatcggcataatcgttaaaacaggtgttatcgtagcgtaaaagcatgcctaccatcccaaataatccctccatctttggttctattatataaaaaaacataaaaacaacccctattacctgtccaatagataacgggggttgttttaatagcgttgcataggggttatttgttaattatagaccctaaacaaacatcttttgtaaaaagccttttttctgttctttcaacaaatctaacttacgttgatgaagagcgatagtgtcatctagttgtttaaagaatgccccaattttttcttgttcttttatatcgggatacctaacatctaaaacatctagtgacttgaaacttatggcaggcattgttgtgctactagaaagagactgaatctttgggtacatagaatctaatctatatttaaaaaaacggttattagctttaaccttaggaattaatttaaaaagattattggcaattactccctcatacccataacctataactccgggttgtccgtatctaatcataaaaagatctgtagcagaaattatattgtgtcctgaatattcaatatatctcggttcttcatctgttgtagttaaatctactattctaataaatctatgtctatgcttccctggtttggtaaattgattttctacaggtacttgttgcccttgcttatataaaaagatatcctccaacttacgctcttcccattcatccgtgaatcctttaaatcgcaattctggaactttctttttaactgaatcatctattttcgccatagtccccaccattttcttggtttttcttgttcttctatcctttttttgatctttgatttgttcctgcaaattttccaacttctctttaagagcgttcacttcatctttacattgattgtctaagtgtttgaattctgtttcctgtgagggcattttgagaacttttaatctgtcgttttctgctttgtattcttctaacaactttttatcttgtaaggctagtcgttgttgctggtctaacaaattttgcgtttgcttttgagattccaacaattgtttattgacttctttcaagtctttaatttgttctagtaaaagactattaacgcttaattcttcattttttttgtcgattttcggtcggcaaaaactttaaatggtattgaacagtctgtttagctagtcctagctcgtccgccaactcttttatcgtttttaagtcttcactcatggtttaagtcctgtcttttaaccgttggtagatattgttcaatggcttttttaaggtacttacagatatttttctttgagtagtcctcttgtttagctctcacgtaagagaggtggtctttgacaccatttagccctcttaattctttcagttcgtcataaagcggataaacgtttttctgtaagcctaccaatatctttttgtcaacaaggtcaagataagacaataagaaatgttctataagtaacttagtataagggctatccattgcctgcaagactaattggtcttctgtttcagctttacgtgctttatcttcttgataagccctatcgtccaacttgtaactgttatcgtctgccatgcgtttcttctcgatatgaaatactatactatcaatcgaacgtccttttttgactttctcataagtcacgttaaaagaggtatgttttgtgatttcttctagaggttctttcaatactctcgtttcaaagtgagtgaatcgtttgtattctattattatcgtatcagtcattattcttagttctttaaccgatattgagggattgcgatagctttctacttggtcggctctccgtccacccttcacgctgtaatactcgtactggttgtaattcatggataaccaacggtagaaaataatggaatacttgctatttaattctgcaatatctgacggtagattgcaaatttaatccgaatttttggacaaatttgttcgtacttttatgtccggattcttgacataggagccaattttgtggcgctcgatttgcttccatcgcttctgtggcatcttcaccattgtactttacaggcgccattagaaatccgtctgctatataatcaacgtcatcatctgccattgttgtagatgacgttgtatcatgattgtcgtttgatgactctgttgatgccatacgagagtagacctctcaaaactaaacaaagtttcgacttcgcaaatgtacaaggttttccgtattattccttagaaaggaggtgatccagccgcaggttctcctacggctaccttgttacgacttcaccctaatcatctgtcccaccttagacggctggctcccgaaggttacctcaccggctttgggtgttacaaactctcatggtgtgacgggcggtgtgtacaaggcccgggaacgtattcaccgcggcatgctgatccgcgattactagcgattccggcttcatgtaggcgagttgcagcctacaatccgaactgagaatggttttaagagattagctaaacctcgcggtctcgcgactcgttgtaccatccattgtagcacgtgtgtagcccaggtcataaggggcatgatgatttgacgtcgtccccaccttcctccggtttgtcaccggcagtctcactagagtgcccaactaaatgctggcaactagtaataagggttgcgctcgttgcgggacttaacccaacatctcacgacacgagctgacgacaaccatgcaccacctgtcactttgtccccgaagggaaagctctatctctagagtggtcaaaggatgtcaagacctggtaaggttcttcgcgttgcttcgaattaaaccacatgctccaccgcttgtgcgggcccccgtcaattcctttgagtttcaaccttgcggtcgtactccccaggcggagtgcttaatgcgttagctgcggcactgaagggcggaaaccctccaacacctagcactcatcgtttacggcatggactaccagggtatctaatcctgtttgctacccatgctttcgagcctcagcgtcagttacagaccagacagccgccttcgccactggtgttcttccatatatctacgcatttcaccgctacacatggagttccactgtcctcttctgcactcaagtttcccagtttccgatgcacttcttcggttgagccgaaggctttcacatcagacttaagaaaccgcctgcgctcgctttacgcccaataaatccggacaacgcttgccacctacgtattaccgcggctgctggcacgtagttagccgtggctttctggttggataccgtcactacctgatcagttactatcaaatacgttcttctccaacaacagagttttacgatccgaaaaccttcttcactcacgcggcgttgctccatcagactttcgtccattgtggaagattccctactgctgcctcccgtaggagtctgggccgtgtctcagtcccagtgtggccgattaccctctcaggtcggctatgcatcacggtcttggtgagcctttacctcaccaactaactaatgcaccgcgggtccatcctaaagtgatagccgaaaccatctttcaaccttgcaccatgcggtgctaggttttatgcggtattagcatctgtttccaaatgttatcccccactttagggcaggttacccacgtgttactcacccgtccgccactcactcaaatgttatcaatcagaagcaagcttcttcaatctaacgagagtgcgttcgacttgcatgtattaggcacgccgccagcgttcgtcctgagccaggatcaaactctcgattaaaagtttgtagctcttgttttgttacttaatttatttgctagcgaaattgactttgcaaatatgttttgtgccccgaagggcgaccctacacatttggtttgtcgaaactttgttcagttttcaaagattaatacatttagaaagtgttaaaaagagagagattctcgaaaaatataaaaggttccaatgattattggtataatggtggatatataatcaattatttgatagggagacaggttaatgaattttgaaaaaataaaccaacttattacaaataaagtgttggtaataattaccctagtgttgtggggaagtgtagcattgggtgcaatatggtttgagggaaaggaagttgcaagtcggtcccttaagctcaatatatttgtaattacaatggtaattattggaatagtaatcatttttctactacagcgcttttttacgattaagcaggcggtgttaattgttttggtagccagctttattattaagttgatttgggttctaagaatcgatacccaaccaacatctgattttttggtattacataatgctgcattaaaagctgccagtggtgatttttcattcatgaagaataattattttttgaattggccttatcaattaggttttgtattatatgaagcaggtattattcgaatatttggaaccagtgttatgatcatcaaatttataaatattatattgtcattgttcatagccctaataatctatctgctgggtaagcaattgtttaatcagaaaattggtctgattggattaaccctagttgcgttttatccgccgtttattttttacactaatgtactgacaaaccagtatattgcgactctatttttttatattggtttttatttactgattaaatatgatacctggggaatggtattttgtagcgggttattcttagggttagggaatattgtccgaccattagggccatttataatccttgcggttttattatttattattttttataaaaaccatgctaaatatcatagtcactggctaactaaattaatattgataattgcaattttaagtggttatcagttagttgttagtggtgtaaatgtcagtgttcaagcaacacagattagtcaatataaattagaaaaccgttcaaatacttggaaattcgtaacggggcttaattatgaaaccaacggaatgtattcgaataaagacttacaattattggataaatacccgattggtcggcaacgcgataaggttgggagaaaaataattaaggagcggctttctgatgagacacaattaatgaaattatttgtaaaaaagagttttatcatgtggtcctatcaggattctgcattaagttggagtggtgcacggcaaaaagtgacagaaaaaaattatcaagtgttactagccgtgcagatgcttttttatacgttgatgatttgtctatcggtagtgggcgtatttaggttattatttcagaaacggcaatcaggacaactttttatgattttaatgattggttattttctagttcatttattgattgagattcaaacgcggtatcgattctttattgtaccaactttattattatttagcgcaattgaattaaacagtattcttagtcgaaataatcgaaaaagaagtagcataagtaatgaaggggaaaagtaaaaatcatcaaaaattgatagtgttaatgattgtttttttaatcgttttgggtaacttaattatgttttctgggtgggttatccctaataaactagtaccaagtacgctaggaataatggcattgggaagtactaaggagctaggaatcgatttgctagtgatcgttagtgctcattttctaattaacaagtcgttagagttaaagtatttgcactaggccctgtcaagttgacaaatgaaataatataaagttgaatctgtctctatgcggcttcactccagtattcatctggggtgaggccgtttctttgtgctgagcggttgtggtgattgaaatattcgattccttcctcaaccagtcttacaagctcttcgcaagtctttgctagtggatggcgagccatccaccgtaacttgaattcgttccaccagcgctccatcggtgcgttgtcgtatggtgttcctggtcgagacatactacgtgtgacgttgtaacgaccaagaaagttgttgaaggcaccagaggtgtaggctgatcctcgatcagtgtgaaccaatgggtggacgtcgccagaagcctcaaaggctcgttggaaaacctcgatttctgctgctgacgtttcagtagtgctcaaattgtaggacaataaacgtcggccgtagagatcaaggacgccactcaagcgcaccttatacttattatttacgccgtaagtcagttccgttgaatcggacaaccagacctgattaggactgtcgacgtcgaagttctgattgagcacattgtcttgaatgtgctgttcgttctccttatgtcgactgtgcttcttgacccgaatttgacatgtcaagctgagctcccgcatcacacgacgtaccatcctgaaagtaacggggaagtcaattaggtcatcatgttgaagattcaataaaaggttcccagcaccgataccttgatgatgaaaatcaaaccagtattgtgtccgttccttgagctgacgattacgggcttcccaagctgtttcttctcgatttaaccctttgtagtaagcctgccggcttacaccgacaacggccaacagcgtagatattgcaccacgcttgccttgactgacctcattaattgcgaagtaagacagtcgatgttgtttactcaccccctgcgctggatttccagcaatttttttgcgaatgcctccacaagctctttgtctgcgagctgtgctttgagctgcctgatttcaagattggctttatcgagttcagtcagctcagcttgttctttgtgatggccacggttgtccacgagcgcctcatagccgccgtgattggccttgattacccatgaacgtgcttgttgataagagacttggaagcgttcagcggcctctgtgtatgaatgattcagcttggtgacatactcgacaatttcaatgcgttcttccaaggttgttttacggctcatagtgggaacctgctttctggacggcgacgccgtcaaaggtttattcccattatacttgtttacccagtctacgacttgctgcgatccacgaagtccaaacttatttgcaagttcatcaaaggtgccttcgcctataagatatgcgtggactactttgagcttgagtttcttcgaatagtgtttgtttttcttagcctcctttagaccattaattccatcacgggagtatcgatctcgccaacgctctagcgtcttatgattaatgccatggcgattggccaccggacccagtccaatttttgattgggtcagttcatctaagattgttaatttctcgagtaccgtatgtttagatctgggcatacaaaaatccctccatagtcgtcagatgaattattgtatttcatctgacaaccataaagggattatcgcatatcccaaaattaattggattcgggtaaagaaatgctgaacgttcttaaaaccataacaattacgtttaagtgtttttatttttcggtttaaaccttctataggcccgtttgagaaaggatattcgagagcgtttttaatataatggcgatttcgctttagtgttcggatcgtcacatctagggggctgttagatggtgtatatgtatctagcaggtgttctattgcttgaaagttcttagtttgaactgcgttcaaaatggtttggtaagcttgatagacacgcgaaaactcgggattatattgtaatcctagatcaacaatattttgttgtgtcgtgtattcatttaaaccgcgataatatttaatatgctgggcatctaaaagtgtttcactcttattaaatagtcgccaatgcgttttaagtgctttgtacgttcggttgtgatggtcctcggtttgtttaacggttaatacacgggcatcagttagtgttcgctgaattagttggataatatgaaatcgatcaatgataatttcagcatttggaaataattgatgtgcatacgttgcataatcggcgttcatatcgactgtgacggtttcaacttgttgtcgctcgtagagcgaatattgattaagaaagaactcaataattgttttcttctttcggtctggtaataagacgagctgcttatgtgtatctgcatcaatgccaataaaagcgtactcgtttttcttgatactaaattcatcaaaactgagattgtgtggcagtggcttgtgatgccagtgatagtggctatttttgtataaaatccgattaactgagctaggcgaagcaccaacgagtttcgcaatctctttgagtgttaaactatcttgggctaattggatgattcgctcaataatatcttgtgtgaaaatactattgaaatttaaaaacggactacgtgcaaaatggctagagtggcaatttttacagtagaaacgttgtttaaataaccgtaaccgataagggatcccattcagactattaatatcgtaggtaacttctttgaagccgttcttaatctgtgcacaaagcccacagtcaggacaacgtcctggtttatagcttaatttggctttgattattttggttctaatatttttgatgaatgtattataaacctcgtaaggtttaatattctcgtctgtaatatcaagtaaatttagtatataatcagtgttggacatcttaacgcctgctttcatttttggtttagtcacttaaaagcgtaacgcagaatatcgttgagatgttctatttttttgtcataaattaaaaaaaggtgtcagtagaatttcttctaccaacaccagaaagtttagacccttaagagtaactcactagttgtctcgtgggttcaacgttataaggcctttggcccaaaaggactagatgtcctatcacccgaaaaaacatttgatggctcatttaagatgaatgttttaaaatggatgaaaacgaataaggcttcttatccgaaaaccgcacttcattttaatatctcaaatgtcgggaccatctggcaatggcaacatatttgggagactgagggcgctgatgccttatatcgttccaaaggacggcaaacaattatgtcagctgataaacaatcaaaaaaacggcaacaaacagagttagaacgtcttagagaagaaaatgaattgctacaaatcgagaatgaatacctaaaaaaattaagagccttagtccaggaagaagaaaacaacaagcgcaagtcatccaagagctaaggcttaaacacaaactagtaaaaattctaaaaatagttggtatggccaaaagtacgtatgaatacattattagtcatgaaccgaacggttcatctgaccaatctgttaaacaaaccatccaaataatcaagaagaatcatccagcgtacggttatcgtcgtgtaactggtgaattacatcgtatgaatatcttagtaaatcataaaaaagtacttgtcttaatgcgagaactgcaattactatcaactgcgtttaacaaacgtactcgtaaatataattcatatagaggcaatgttggtaccgttgctaagaacttgatcaaccgtcgtttcttcactgatcgtccttatcaaaaactagtaacagacgttactgaagttcgctggggaaccaagacaattgatgaacgcgcctatttcacatgtatttatgatttattctcaggtgaaattctcagccatcaagttagtaaacaccctactgttgaatttactacaactgttttgaatcgagcagttaagaaaatccctaagaatttaaaataccggacaacagtccactcagatcaaggatttcaataccagcatcaagattggactcatatcttgaaagaacatcgcatttttcaaagtatgtctcgcaaagcaacatgtttagataatgcagcaatggagagctttttccatattatgaaagccgaagctttctaccaaaaagaaaccgatacttatgaaacgctagtttcacaaatatcggtttggattgatgattataatttttcaagaattaaaacaaaatgctcctatcctagtatttggtacataaatttctgaacagttgtgccataattaataaaacaagataggagcattccaatgaaacgatatcaagatgattttaaagccagcattgtgaagatgcatcgtgaagagaaaagatctattcgctcgctttccgaggaatacggtgtttctccagccgcaattcataactgggttaaaggcgctaaatcagttgagctagaagacggtactgaagtaacgtccaaagaattcaaacaacttcaaaaggaaaatcagcgattaaaggaggaactcgaaattttaaaagctgcggcggtgttactgggaaagcattaggacgaattaattgccttgtcttcatagaagatcagttattgcgacaccgcttatcaattattctttcggcactgaaattaccgcgcagcacctattaccattggaaaagatatcaacctagtcaacacgaacgtgttgataatcaactcaaagaaaaaattaaattgatttgggaaaataattatcgtgcctatggttatccacgaataacgatggtgcttcgcaagtcaggcatctgtgttgggtcaaaacgaattttacgattaatgagggaaatggagattcactctttaatgaatcggcgatttaaaaaacctggcactcatgtggatcattcacaacgccccaatttaatcaagcaccagcccaatgcgaggatatggcgtgctgacattacttatttggaattacgtccaggaacctgggtttatctcagttctatttacgaaccaaaggttcatcaagttcttgctttcaagattggtcgtcagatggaggcgacgttagttgtagaaacgattaatcaggcgcttgaatatcatcaaaagccacaatattttcactctgacatgggttcacagtacaccagcaacgaagttgaaactttacttgaacggcatcagattagccactcatactcaaaacaaggttatccttatgataatgggccaattgaagcttttcactcattgttgaagagagagtttgcctttcaaacaactttttccaattttgaggacttggtaatccgaacctcaaattacatcagttggtttaattccgacagaattagaacgagtgtttagaaaaagatgtgccatttattgacataggagcacaacgtcagtgtttcaacggtcactaagtggattaaacaagctgatcctaacaacactaaagtgctatcatcaaatgaacgtgctctgattaaagaaaataaacggttaaaagaagaacttgatattttaaaacgagcggcggtgctcatggcaaaaagctaattattaaagggcgtgccctcgtgttagaagtcgtcaacgctaatttacttgctgggcaccgcattacgcgtatcttatcagtactcaaaattccgcgctcaacctactatgattatctacattggcagccaagtagaactgaacgccgccggcatttaattaaacaagaagtgttaacggcttggttaagatatccaatgtatggctacccacgattaacgatcttactaaatcaacagtctgatattcacgttagtcagcgtctggtctatcaacaaatgtgtgaattagggattagatctagaatggttaaacgaatcaataagccaaccactcagactgattatgatcagcgaccaaacttgattaagcagttaactgatcaatctggtattttattgactgatattacgtacattccccttaaccatacttggtgttacctagctagtgtctataatccagtaacccgacgggttattgcttaccaacttaatacgcagatgactaaagaactagcgactaacgttattacccaagtcatggcgcaagcagttaaaccacaaattattcatagtgatatgggaagccaatacacaagtgacttatttgaaaacactttatcgaagtatggtatcaagcattcttactcccgaaagggtcagcccggcgataacgcgcgaattgaaagttttcattcaattttgaaacgtgaatacgttaatttccaagattttaagacaattcatgaagcaatcgccggaattgataactatattcgttggtataacagtgatcgtatttcacttgtagcgtagctacaggctattaaattcaataatgttggggcttatttaatatactctaaagcgtttttaaaatctgaacgggactaaaacttcggcctccgaaaattaaattaagtaatttaaattgaaagtcaaatttgttcgtacttttatgtccggattcttgacataggagcctaggatgatttaaatgccaattccaggcagtttcaataattgcttccatattgtcatactgtggcgtccaacctaagacttcgcgtgctttgtcacttgcggcaatcaaagtacttggatcaccagcacgacgcggtgccattgtcacaggaattgccttgccagtcactttgcgagcggcttcgacaatttccatatttgaaaaaccagttgatgagcctaagttaaaggcgttactatcatggccttcttcgaggtaaccgagggccaaaatatgggcgtcggctaagtctaacacgtggacatagtcgcggacgttagtgccatctggtgtatcataatcatcaccaaagatggagagttgttcacgtttgccagcagccacttgtaacacgattggtaacaagtgggtttctgggtgatgatcttcaccgattgaaccatctggtttggcaccagcgacattgaagtaccgtaatgcaacgaatttaataccgtaagctctgtcagcccatttcatcatcgtttccatcattaatttactttcaccatacgggttagttgggacttgtgggtcggattccttaattggaattgatttcggttccccataagtggccgctgttgatgaaaagacgatgtgtttgacgtcgaattcattcatcacttcgagtaaggcagtcatgccgtatgtgttattgtcgaaatatttaagtggtgcttgcatcgattcgggcacgattgagaaagcggcgaaatgaatcacaccgctgactttttcttgttggaagacgctgcgcatgaaatctttgtcgcgaatatcgccttggtaaaagcgcgcttgtgaattaatggcggcttgatggcctaataacttatttgaaccctggaaagcattaaatcaggcggccatttggctcgtaagtgttgcaatttcaacttgtaagggggtctggtagcccagtgaactatgaattctcttcctattgtagaaagcatgcacatattcaaaaaggacggcagcggcagtttcataatcttcaaagaccggcactggataaacacattcctttttgagggaagcgtgaaaggattccattggcgcattatcatacggataacccttacggctgtatgagtggcggatatgtagctcagttaaacgttgattgtaatcatcgctggtatactgtgatcctaaatccgtatggataatcaggtccccagtaatggttcgatttttaaccgcgctttcaagggtctttaagactaaatcagtagccatcttttttgagaacgaatagccgataatccgtcgtgagtgcaggtccatgatggttgataagtaacaccagccattacgcttcgtttgaatataggtcatatcagcggtccatttttgatttaaaccagtggtcgagaaatcctgcttaagcaagttgggacgctgttcaaccttggttttggaagccgaagccgctttccacttattgacggtaacggagtggctatccagttccttcatgagccgggaaatccgtcgtggactgcaccgaagctgcagtggttgaagttccagattcaattcatggtggatcttcataacaccgtatcgctgcttaaattccgcaaagatccgcagaatccgttgtttcaagcccgcatcttcggcccggcgttttgaaggtttgggggatcgataacgataatactgagctctggaaacaccgcattggggggttgctaaaaatgacattaactatgtgtcaccgaagcaacttattgatcaaatttgtaattccagaaaagtcggtgctaatttattaattaataccgggcttgaatttgacggtgccattccagcattttcacagtcgttattgaagattgtcggacaatggatgtcagtttatggagaagcaatttatgcgacaaatcattatgaaaatcagacctacttggcaagtggcgagacaaccgattttatcaaaggaaactatctgtttgtctatggtttaggtaatataggtaatagtaatgttgtgctgggtggcgaaaaggcgcggaagatagtgtttaatcaatatccgcaacgcgtaactagcatcacttggttagataatcaagcgttgtttgagtttgagcaggctttagacgggacgctaacaatttatgccaatgcttttcaatatgggacacatttaattgatcgcgtagccactataactgtcgaagactagtgacgaggtagaagatgaaaacaaaagatgtaacgattaggtatcaaaaaacagcgacggttcatagtgatcgcaatcaactggcttggcttggaaagatagcagttgggacatgtttcttgatgtacgtatcatatatccaacaaattatggctaatttagctgggcaccctgtgtcggcgattcaaccaagcgttgcgatggttaatgcgactttgtggtttagttacggttggtttaaaccacataaagattggccaatcatcatttcaaatgtcccaggaatcatatttgggctggtaacattaattacaatttattaccattaatagcaaaataaccccctcgctcccatggtgaatatggatggcaaaaataaactttgatctgataatcctgttctaaggcctgataattggcaaactctttaccatgatcaacagtaatggattttacttggggaccgaaggcccccataaacttgccaaaggcggtgtttagagccttagccgttctattaggggctttgatggcccatagaagtcgggtcttacgttctacgaatgtaaccagacatgatcgtgactcacttcgactagaaagcaccgtatctacttcccaatgaccaaaagctaaccgttgattaacagttgttggccgttgttcgatggaagtcccacttgtaaatttcccacgattttcgctcactcggtgctggcggacattccgattgggtagatcagtcaatttgaaggggagccagccacgattaagccaattataaattgacgcagtgctcaagttataagcggccgcaatggtttctggtgaccaggttaatcgtaagtgattggtaattaaagtcgctaatgctgccgtcagcatcgaacgacgaccgcaattccgccttttgcgatctgcatcttgctgagctaattctggatcataaggtttaactcggtccaactcatagctaatcgtagctttggcgacgcctaaggcgtcagccattacttggtaagatttattcccctcattgaccagttgtgctagtgcgccacgttgaaaacgtgataaagtagatgtacccaaagtaatcactccctatattggttggaattagctactaccattgtaagtgattgctttgggctttttaatttctgttcggattaattatagaatttgccataatttgcctgccttatttaatttacactcattgttacccactacccattcatcctttgtacgtataaaggggttttgcgcactttcctttaacgcgttttgaacatcttcataaggtaaataaaattcaattgtagatttatttaattggtagattgtaacgtctccatcttttcaaaacgacttaattctacgggctataaataacttaatttgccagtgtataacgtttcagattaagctaccactatgctacaataaccatatcgaaaggagatcaatctaatgaaatatacgaaaaccaaagcagtattaaatcaactcgttgccgatttgagccagatgtcaatgattatccatcagacgcattggtacatgcgtggacccaactttttgaagttgcaccccttgatggatgagttcatggaagaaattgacagccaactcgatgtcatttctgaacggctgattgcgcttgatggcagtccttactcgaccttaaaagaaatggccgaaaacactaagattcaagactggcctggtgaatgggataaaacaaccccagaacgcctcgcacacttagttgatggctatcgttacttggaagacctttaccaacacggcattgaagtatccgatgttgaaaaagacttcagtacccaagatattttcattggtctcaaaaccgcaattgagaagaaaatctggatgattcaggcagagcttgggtcggcgccggaaattgatgaataaaataatattaaaaaatcggtaggcttatggtagattgtaaaattaatttttattgatggaggtttagctcagttgggagagcgtctgccttacaagcagagggtcacaggttcgagccctgtaacctccattgagtcgttagctcagttggtagagcatctgacttttaatcagagggtcgacagttcgagcctgtcacgactcatcggccaagttacacgccaaaatgcgggtgtggcggaattggcagacgcgctagatttaggttctagtgtctatatagacgtgggggttcaagtcccttcacccgcattcaattgaatattcaatgaaagttatcttattatgccgacttagctcagttggtagagcatctgatttgtaatcagagggtcgggcgttcgaatcgtctagtcggcattaagatgcggaagtagttcagtggtagaacatcaccttgccatggtgggggtcgcgggttcgaatcccgtcttccgctttcattatgattaagccggggtggcggaactggcagacgcacgggacttaaaatcccgcggtaggtgactaccgtaccggttcgattccggtcctcggcatcataatgaaaaatgcacccatagcgcaactggatagagtgtctgactacgaatcagaaggttgtaggttcgactcctactgggtgcatataacgggaaatagctcagcttggtagagcacctggtttgggaccagggggtcgcaggttcgaatcctgttttcccgattttggaggagtagcgaagtggctaaacgcggcggactgtaaatccgctccttcgggttcggtggttcgaatccactctcctccatattttttagggatatagtttaaaggtagaactacggtctccaaaaccgtcagtgtgggttcaattcctactatccctgtttatattatagcttgcatattatgtgtgaatgtagtataattattcatgttaatgatggcggtattggtgaagtggttaacacatcggtttgtggatccgacatacgtgggttcgattcccacataccgcctttattcttgggctatggccaagcggtaaggcaacaggttttgatcctgtcatgcgctggttcgaatccagctagcccaatttactttttaagggacaggatttgttcttttatggcggtatagccaagtggtaaggcagaggtctgcaaaacctttatcaccggttcaaatccggttaccgcctttgcgtttaggcgctaaccttaattggtcaaaatgccggtgtggcggaattggcagacgcgcgggattcaaaatcccgtttcctcacggaagtatcggttcgaccccgatcaccggtataattgaacattatacagttttaaaaagccttagagatagggctttttttgttgcgttaataccatggttcttttgaatactaatagttaatcaagtgatactagcccactaaactcagtgccacggtccacagtaaagctgtgcaccggaccattaaaagtggttaggaacttagttagtgcttcattaacagtcgctgtcgtccgatcttttaaccggtatgcccaaaggaaccgtgatttgcgatcgattaaagttaataaaactgccttactatgcccacgaggaccaacgactgtatctagttcaaaatcgccgatgcgcttacgttgattaatcatcatgggacgctgttcaattgatcgccccaaagattgattatatttggatcgttggtcaacgttacgccgttggcgtacgccatgttcaggtagatcattcaaggagaaaccaattctcccctgatttagccaattataaatagatttagtagctagtttaaattcgtgagcaatcattcctggtgaccagcttagacgtaaatggttgagaattttttgctttaactcatcgctcagcttagttttccgaccacatcgtgatcgcttgtattcggcatctgtttgtgctaattcagcctgataaggttgacatcgagataattcataagaaattgttgacggtgatcggttcagattgcgggagtagggtttgaacctacgaccttcgggttatgagcccgacgagctaccagactgctccatcccgcgataatataaaggagaatgagagattcgaactctcgcgtgggcagaacccacctgacggttttcaagaccgttcccttcagccagacttgggtaattctccataaaacatataaaatgtaacattgttacaatgacccgtacgggatttgaacccatgataccgccgtgaaagggcggtgtcttaaccacttgaccaacgggccatacaaaacggagaaggagggatttgaaccctcgcgccagtttcccgacctacacccttagcaggggcgcctcttcagccacttgagtacttctccatattatttagataatgggcctaaatggactcgaaccatcgacctcacgcttatcaggcgtgcgctctaaccagctgagctataggcccatgaaaagcgggtgacgagaatcggactcgcgacaacagcttggaaggctgtggttttaccactaaactacacccgcatattcatgat
